(19) United States
(12) Patent Application Publication
(10) Pub. No.: US 2021/0205365 A1
(43) Pub. Date: Jul. 8, 2021

(54) Chimeric Growth Factor Receptors

(71) Applicant: Instil Bio (UK) Ltd., Manchester (GB)

(72) Inventors: Nicola Kaye Price, Manchester (GB); John Stephen Bridgeman, Manchester (GB)

(21) Appl. No.: 17/124,922

(22) Filed: Dec. 17, 2020

Related U.S. Application Data
(63) Continuation-in-part of application No. PCT/GB2019/051745, filed on Jun. 21, 2019.

(30) Foreign Application Priority Data
Jun. 21, 2018 (GB) 1810181.6

(51) Int. Cl. A61K 35/17; C07K 14/71; C07K 14/725; A61K 38/19; A61K 31/4152

(52) U.S. Cl. CPC A61K 35/17; C07K 14/71; A61K 31/4152; A61K 38/196; C07K 14/7051

(57) ABSTRACT

Adoptive cell therapy involves the transfer of autologous or allogeneic cells to patients in an effort to treat a variety of diseases. In the area of immunotherapy, tumour specific T-cells can be grown ex vivo, or engrafted with tumour specificity via genetic engineering approaches, prior to reinfusion. T-cell infusions require a pre-conditioning treatment, and often a post infusion treatment of IL-2, in an effort to enhance persistence and engraftment. Herein Applicants show that T-cells can be engineered to express a Chimeric recombinant Growth Factor Receptor (CrGFR) which allows the selective survival and/or expansion of T-cells upon administration of a clinically available drug, Eltrombopag.

### RELATED APPLICATIONS AND INCORPORATION BY REFERENCE

[0001] This application is a continuation-in-part application of international patent application Serial No. PCT/GB2019/051745 filed Jun. 21, 2019 and published as PCT Publication No. WO2019/243835 on Dec. 26, 2019 and which claims benefit of priority to patent application Serial No. GB 1810181.6 filed Jun. 21, 2018.

[0002] The foregoing applications, and all documents cited therein or during their prosecution (“appln cited documents”) and all documents cited or referenced in the appln cited documents, and all documents cited or referenced herein (“herein cited documents”), and all documents cited or referenced in herein cited documents, together with any manufacturer's instructions, descriptions, product specifications, and product sheets for any products mentioned herein or in any document incorporated by reference herein, are hereby incorporated herein by reference, and may be employed in the practice of the invention. More specifically, all referenced documents are incorporated by reference to the same extent as if each individual document was specifically and individually indicated to be incorporated by reference.

### SEQUENCE STATEMENT

[0003] The instant application contains a Sequence Listing, which has been submitted electronically and is hereby incorporated by reference in its entirety. Said ASCII copy, is named 00011SL.txt and is 570 kb in size.

### FIELD OF THE INVENTION

[0004] The present invention relates to T-cells engineered to express a Chimeric recombinant Growth Factor Receptor (CrGFR) which allows the selective survival and/or expansion of T-cells.

### BACKGROUND OF THE INVENTION

[0005] Adoptive cell therapy (ACT) using autologous T-cells to mediate cancer regression has shown much promise in early clinical trials. Several general approaches have been taken such as the use of naturally occurring tumour reactive or tumour infiltrating lymphocytes (TILs) expanded ex vivo. Additionally, T-cells may be modified genetically to retarget them towards defined tumour antigens. This can be done via the gene transfer of peptide (p)-major histocompatibility complex (MHC) specific T-cell Receptors (TCRs) or synthetic fusions between tumour specific single chain antibody fragment (scFv) and T-cell signalling domains (e.g. CD3), the latter being termed chimeric antigen receptors (CARs). TIL and TCR transfer has proven particularly good when targeting Melanoma (Rosenberg et al. 2011; Morgan 2006), whereas CAR therapy has shown much promise in the treatment of certain B-cell malignancies (Grupp et al. 2013).

[0006] The current general treatment protocol for ACT requires an initial non-myeloablative preconditioning treatment using cyclophosphamide and/or fludarabine which removes most of the circulating lymphocytes in the patients prior to reinfusion of the ex vivo grown cells. This allows space for the new cells to expand and removes potential ‘cytokine sinks’ by which normal cells compete with the newly infused cells for growth and survival signals. Along with the cells patients receive cytokine support via infusions of high doses of interleukin (IL)-2 which helps the new cells engraft and expand.

[0007] There are a number of factors which currently limit the technology of T-cell ACT. Current preconditioning therapy described above requires hospital admission and potentially leaves patients in an immunocompromised state. Furthermore, many patients are not in a healthy enough state to be able to withstand the rigours of this treatment regimen. Beyond preconditioning the use of IL-2 as a supportive therapy is associated with severe toxicity and potential intensive care treatment. Indeed, TIL therapy itself, unlike TCR and CAR therapy, has not been associated with any serious on or off target toxicities, with the majority of toxicity events being associated with the accompanying IL-2 infusions.

[0008] Methods by which preconditioning and IL-2 supportive treatments can be minimised or reduced will have major benefits in that they will: (i) reduce patient hospitalisation, (ii) increase the proportion of potential patients who could be treated by ACT, (iii) reduce the clinical costs associated with extensive hospital admission, thus again opening up the possibility of ACT to more patients.

### SUMMARY OF THE INVENTION

[0009] Thus there is a need for new ACT therapies that minimise the need for preconditioning treatments and/or IL-2 supportive treatments.

[0010] The present invention uses cells that express recombinant chimeric growth factor receptors which can be turned on or off by the administration of a ligand for the CrGFR, which may be a clinically validated drug. This permits expansion of target cells in-vivo with minimal toxicity to other cells.

[0011] A number of reports have used the idea of growth factor receptor engineering as a means of expanding certain populations of cells or for the development of selection processes for antibody engineering strategies. For example, a number of reports have demonstrated that antibody-TpoR or EpoR fusions could be used to for a number of biotechnology strategies such as single chain antibody selections (Ueda et al. 2000, Kawahara et. Al. 2004), and a number of reports have demonstrated that growth factor receptor fusions can successfully expand the megakaryocyte cell line Ba/F3 and/or haematopoietic stem cells (Jin et al. 2000; Richard et al. 2000; Nagashima et al. 2003; Kawahara et al 2011; Saka et al. 2013).

[0012] The thrombopoietin (Tpo) receptor (TpoR; CD110, c-mpl) is normally expressed in cells of the megakaryocyte lineage. In its normal state the TpoR is switched on in response to thrombopoietin, which causes megakaryocyte production of platelets. There is also an active negative feedback loop by which platelet expression of TpoR can be used as a sink to reduce circulating levels of Tpo. Importantly TpoR is not expressed on any other normal tissue or cancer cells (Columbyova 1995).

[0013] Recently a report demonstrated that T-cells could be engineered with the wild-type TpoR which could permit controlled survival and expansion of T-cells via administration of Tpo or Eltrombopag (Nishimura et al. 2018). However, there have been no reports of T-cells, or other lymphocytes, being engineered to express chimeric growth factor receptors such as thrombopoietin fusion receptors, and no reports of the use of these cells in ACT.

[0014] The present inventors have shown that it is possible to engineer lymphocytes, including T cells and NK cells that comprise a CrGFR that can function as a growth switch. This allows the lymphocytes to be expanded in-vivo by administering the CrGFR ligand to the patient. The inventors have shown that a CrGFR, for example, based on the thrombopoietin (Tpo) receptor (TpoR; CD110, c-mpl), induces proliferation of the engineered lymphocyte following binding of a CrGFR ligand to the receptor. Thus the ligand causes proliferation of cells, or protection from activation-induced cell death, that express the CrGFR but is expected to have low toxicity due to the absence, or low expression, of receptors on other cells in the patient. CrGFRs based on TpoR or other related growth factor receptors would be a valuable tool to augment lymphocyte expansion in vitro and in vivo for adoptive cell therapies.

[0015] Thus in a first aspect, the present invention provides a lymphocyte, including a T cell or NK cell, comprising a chimeric recombinant growth factor receptor (CrGFR) comprising:

(i) an extracellular (EC) domain;
(ii) a thrombopoietin transmembrane (TM) domain; and
(iii) a first intracellular (IC) domain; and, optionally, (iv) a second intracellular domain.

[0016] The CrGFR is designed such that binding of the receptor ligand to the CrGFR results in receptor activation and growth signalling to the cell to induce proliferation and/or survival.

[0017] The ligand may be human thrombopoietin, or a thrombopoietin receptor agonist, e.g. Eltrombopag, Lusotrombopag, Avatrombopag or Romiplastim.

[0018] The EC domain may be the human c-mpl EC domain (which binds to human Tpo) or may be one or more of i) a truncated EC domain, ii) a truncated c-mpl EC domain, iii) a selection marker, for example CD34.

[0019] The IC domain of the CrGFR may include a JAK binding domain. The IC domain consists of two or more growth factor receptor or other signalling domains where one may be from the list of: human growth hormone receptor, human prolactin receptor or the human thrombopoietin receptor (c-mpl) and additional growth factor or other signalling domains which may be derived from the list of (but not limited to): cytokine receptor signalling domains (e.g. IL2 receptor), Cosignalling domains (e.g. CD40), viral oncogenic proteins (e.g. LMP1), costimulatory domains (e.g. CD28, CD137, CD150 etc) or other mitogenic domains (e.g. Toll like receptors, immunorecptor tyrosine-based activation motifs, CD3 signalling domains etc).

[0020] The lymphocyte may be a T cell, including a Tumour Infiltrating Lymphocyte (TIL) a T Regulatory Cell (Treg) or a primary T cell, or an NK cell, or a dendritic cell.

[0021] In addition to the CrGFR the lymphocyte, T or NK cell, may include a recombinant T-cell receptor (TCR) or Chimeric Antigen Receptor (CAR).

[0022] In a second aspect the invention provides a nucleic acid sequence encoding the CrGFR.

[0023] In a third aspect the invention provides a vector which comprises a nucleic acid sequence according to the second aspect and, if present, a TCR and/or CAR nucleic acid sequence.

[0024] In a fourth aspect the invention provides a method for making a lymphocyte, or T or NK cell, according to the first aspect of the invention, which comprises the step of introducing a nucleic acid encoding the CrGFR, or vector, into the lymphocyte.

[0025] In a fifth aspect the invention provides a pharmaceutical composition which comprises a vector according to the third aspect, or lymphocyte (including a T or NK cell) according to the first aspect, together with a pharmaceutically acceptable carrier, diluent or excipient.

[0026] In a sixth aspect the invention provides a method of in-vivo cell expansion comprising administering the lymphocytes, or T or NK cells, of the first aspect, or pharmaceutical composition of the fifth aspect to a subject. The cells may be expanded in-vivo by administering thrombopoietin, or a thrombopoietin agonist such as Eltrombopag, to a subject.

[0027] In a seventh aspect the invention provides a lymphocyte, including a T or NK cell, according to the first aspect, or vector according to the third aspect, for use in adoptive cell therapy.

[0028] In an eighth aspect the invention provides a lymphocyte, including a T or NK cell, according to the first aspect, or vector according to the third aspect, for use in a method of treating cancer.

[0029] In a ninth aspect the invention provides the use of a lymphocyte according to the first aspect, or the use of the vector according to the third aspect in the manufacture of a medicament for treating cancer.

[0030] In a tenth aspect the invention provides Eltrombopag or Tpo for use in adoptive cell therapy.

[0031] In an eleventh aspect the invention provides Eltrombopag or Tpo for use in the in-vivo expansion of lymphocytes, including T or NK cells.

[0032] In a twelfth aspect the invention provides a lymphocyte of the first aspect for use in combination with thrombopoietin or a thrombopoietin receptor agonist, for example Eltrombopag, in the treatment of a cancer.

[0033] Accordingly, it is an object of the invention not to encompass within the invention any previously known product, process of making the product, or method of using the product such that Applicants reserve the right and hereby disclose a disclaimer of any previously known product, process, or method. It is further noted that the invention does not intend to encompass within the scope of the invention any product, process, or making of the product or method of using the product, which does not meet the written description and enablement requirements of the USPTO (35 U.S.C. § 112, first paragraph) or the EPO (Article 83 of the EPC), such that Applicants reserve the right and hereby disclose a disclaimer of any previously described product, process of making the product, or method of using the product. It may be advantageous in the practice of the invention to be in compliance with Art. 53(c) EPC and Rule 28(b) and (c) EPC. All rights to explicitly disclaim any embodiments that are the subject of any granted patent(s) of applicant in the lineage of this application or in any other lineage or in any prior filed application of any third party is explicitly reserved. Nothing herein is to be construed as a promise.

[0034] It is noted that in this disclosure and particularly in the claims and/or paragraphs, terms such as “comprises”, “comprised”, “comprising” and the like can have the meaning attributed to it in U.S. Patent law; e.g., they can mean “includes”, “included”, “including”, and the like; and that terms such as “consisting essentially of” and “consists essentially of” have the meaning ascribed to them in U.S. Patent law, e.g., they allow for elements not explicitly recited, but exclude elements that are found in the prior art or that affect a basic or novel characteristic of the invention.

[0035] These and other embodiments are disclosed or are obvious from and encompassed by, the following Detailed Description.

### BRIEF DESCRIPTION OF THE DRAWINGS

[0036] The following detailed description, given by way of example, but not intended to limit the invention solely to the specific embodiments described, may best be understood in conjunction with the accompanying drawings.

[0037] FIG. 1—Schematic representation of Chimeric recombinant Growth Factor Receptors containing growth factor domains. These receptors consist of the TpoR extracellular domain and transmembrane domain which spans the plasma membrane. The intracellular domain consists of the TpoR cytoplasmic domain fused to one or more additional domains which augment the overall activity of the receptor and may be derived from a selection of a growth factor domain, cosignalling domain or costimulatory domain as detailed in the figure legend. Δ60=TpoR with 60 amino acid C-terminus deletion, IL2rβcyt=cytoplasmic domain of IL2 receptor beta chain, SLAM=SLAM/CD150, TIAF1=TGFβ1 induced anti-apoptotic factor 1, TLR1=Toll-like receptor 1, CD40=CD40/TNFRSF5, IL2rγ=IL-2 receptor common gamma chain, ITAM1=Immunoreceptor tyrosine based activation motif from CD3, LMP1=Epstein Barr Virus Latent membrane protein 1.

[0038] FIG. 2—Schematic representation of Chimeric recombinant Growth Factor Receptors containing costimulatory domains. These receptors consist of the TpoR extracellular domain and transmembrane domain which spans the plasma membrane. The intracellular domain consists of a costimulatory domain obtained from a defined costimulatory receptor such as, but not limited to, CD28 or CD137.

[0039] FIG. 3—Schematic representation of the gene organisation of the lentiviral transgene. The TpoR transgene was codon optimised and cloned downstream of the EF1α promoter by way of an XbaI and NheI restriction digest pair in the pSF. Lenti Lentiviral vector.

[0040] FIG. 4—Flow analysis of non-transduced, wildtype (WT) and variant Chimeric recombinant Growth Factor Receptors in Jurkat E6.1 cells. Jurkat E6.1 T-cells were transduced with lentiviral particles carrying the indicated transgenes. Expression was assessed 72 h post infection using anti-CD110-PE antibodies.

[0041] FIGS. 5A-5B—Analysis of Chimeric recombinant Growth Factor Receptor activity in Ba/F3 cells. The cytokine dependent murine B-cell line Ba/F3 was transduced with the indicated CrGFRs and Incubated with either IL-3 or Eltrombopag for 10 days. Expression of CrGFR was assessed by flow cytometry at the indicated time points using CD110 antibodies.

[0042] FIGS. 6A-6B—Analysis of Eltrombopag and IL-2 on primary human T-cells from Donor 1. Primary human T-cells from donor 1 were transduced with the WT TpoR or variant CrGFR and incubated in the presence of IL2 or Eltrombopag. Cells were removed at time points up to 21 days and the proportion of cells expressing the receptor assessed using PE conjugated anti-CD110 antibodies and a MACSQuant analyser.

[0043] FIGS. 7A-7B—Analysis of Eltrombopag and IL-2 on primary human T-cells from Donor 2. Primary human T-cells from donor 2 were transduced with the WT TpoR or variant CrGFR and incubated in the presence of IL2 or Eltrombopag. Cells were removed at time points up to 21 days and the proportion of cells expressing the receptor assessed using PE conjugated anti-CD110 antibodies and a MACSQuant analyser.

[0044] FIGS. 8A-8B—Analysis of Eltrombopag and IL-2 on primary human T-cells from Donor 3. Primary human T-cells from donor 3 were transduced with the WT TpoR or variant CrGFR and incubated in the presence of IL2 or Eltrombopag. Cells were removed at time points up to 21 days and the proportion of cells expressing the receptor assessed using PE conjugated anti-CD110 antibodies and a MACSQuant analyser.

[0045] FIGS. 9A-9B—Selection of optimal CrGFRs for next round of analysis. Flow cytometry plots showing expression of CrGFRs in ×3 donor primary human T-cells after 21 days incubation in Eltrombopag. The receptors TpoR.CD40, TpoR.IL2rγ, TpoR.ITAM1, TpoR.A60, TpoR.LMP1-cyto and TpoR.TpoR-cyto.LMP1-cyto were chosen for future comparison with the wt TpoR.

[0046] FIG. 10—Analysis of Eltrombopag and IL-2 on CrGFR sorted primary human T-cells from Donor 4. Primary human T-cells from donor 4 were transduced with the WT TpoR or variant CrGFR, and enriched for expression by Miltenyi MACS technology selected for and incubated in the presence of IL2 or Eltrombopag. Cells were removed at time points up to 7 days and the number of cells expressing the receptor assessed using PE conjugated anti-CD110 antibodies, DRAQ7 viability dye and a MACSQuant analyser.

[0047] FIG. 11—Analysis of Eltrombopag and IL-2 on CrGFR sorted primary human T-cells from Donor 5. Primary human T-cells from donor 5 were transduced with the WT TpoR or variant CrGFR, and enriched for expression by Miltenyi MACS technology selected for and incubated in the presence of IL2 or Eltrombopag. Cells were removed at time points up to 7 days and the number of cells expressing the receptor assessed using PE conjugated anti-CD110 antibodies, DRAQ7 viability dye and a MACSQuant analyser.

[0048] FIG. 12—Analysis of Eltrombopag and IL-2 on CrGFR sorted primary human T-cells from Donor 6. Primary human T-cells from donor 6 were transduced with the WT TpoR or variant CrGFR, and enriched for expression by Miltenyi MACS technology selected for and incubated in the presence of IL2 or Eltrombopag. Cells were removed at time points up to 7 days and the number of cells expressing the receptor assessed using PE conjugated anti-CD110 antibodies, DRAQ7 viability dye and a MACSQuant analyser.

[0049] FIG. 13—Analysis of Chimeric recombinant Growth Factor Receptors in TIL042. Tumour Infiltrating Lymphocytes from TIL042 were transduced with the WT TpoR or indicated variant CrGFR and incubated in the presence of patient matched tumour lines with the addition of IL2, Eltrombopag, IL-2+Eltrombopag, or no growth factors. Cells were analysed and counted at days 4 and 7 and the number of cells expressing the receptor assessed using PE conjugated anti-CD110 antibodies, DRAQ7 viability dye and a MACSQuant analyser. Graphs show counts between days 4 and 7 when recovery of TIL occurs after an initial contraction in numbers driven by tumour regulatory factors and/or activation induced cell death.

[0050] FIG. 14—Analysis of Chimeric recombinant Growth Factor Receptors in Ovarian TIL. Tumour Infiltrating Lymphocytes from ×3 ovarian TIL were transduced with the WT TpoR or indicated variant CrGFR and incubated in the presence of patient matched tumour cells with either Eltrombopag or no growth factors. Cells were analysed and counted at days 4 and 7 and the number of cells expressing the receptor assessed using PE conjugated anti-CD110 antibodies, DRAQ7 viability dye and a MACSQuant analyser. Graphs show counts between days 4 and 7 when recovery of TIL occurs after an initial contraction in numbers driven by tumour regulatory factors and/or activation induced cell death.

[0051] FIG. 15—Induction of pSTAT by chimeric recombinant growth factor receptors. Primary human T-cells were isolated and transduced with the indicated CrGFR. Cells were enriched for CrGFR expression using Miltenyi MACS technology and expanded via polyclonal stimulation. The enriched cells were stimulated for 4 h with either media alone (RPMI), IL2, IL12, Tpo or Eltrombopag (Elt) before methanol fixation and intracellular staining with antibodies towards phospho-STAT5.

### DETAILED DESCRIPTION OF THE INVENTION

[0052] Provided herein are recombinant growth factor receptors (CrGFR) comprising: (i) an extracellular (EC) domain; (ii) a thrombopoietin transmembrane (TM) domain; and (iii) a chimeric growth factor receptor intracellular (IC) domain. In a simple form the CrGFR may contain the full length human Tpo receptor (as provided in FIG. 1 herein) or derivative or variant thereof that maintains signalling and cell proliferation in response to ligand binding (for example this may include a truncated thrombopoietin signalling domain which has been shown to maintain signalling capacity). The CrGFR may be of modular form with the EC, TM and IC domains derived from different receptors. However, the CrGFR must maintain its ability to transmit a growth signal to the cell upon ligand binding. The CrGFR may be activated and transmit a growth signal to the cell upon ligand binding to the TM domain. The signalling domain may contain one or more additional signalling domains.

[0053] Suitable CrGFRs may be selected based on GFRs with limited expression on normal human tissue, for example, GFRs that are expressed on only a small cell population or confined to a specific cell type, for example, c-kit. Alternatively, the native ligand binding domain of the growth factor receptor may be removed and e.g. replaced with a marker or other EC domain.

[0054] The CrGFR may comprise an EC domain without growth factor binding function (for example a truncated form of the TpoR EC domain) and/or a marker, for example CD34), and the TM and IC domains from TpoR. Growth of cells carrying this type of receptor may then be stimulated by Eltrombopag binding to the TM domain.

[0055] The CrGFR may be expressed alone under the control of a promoter in a therapeutic population of cells that have therapeutic activity, for example, Tumour Infiltrating Lymphocytes (TILs).

[0056] Alternatively, the CrGFR may be expressed along with a therapeutic transgene such as a Chimeric Antigen Receptor (CAR) and/or T-cell Receptor (TCR), for example as described in FIG. 14. Suitable TCRs and CARs are well known in the literature, for example HLA-A*02-NYESO-1 specific TCRs (Rapoport et al. Nat Med 2015) or anti-CD19scFv.CD3ζ fusion CARs (Kochenderfer et al. J Clin Oncol 2015) which have been successfully used to treat Myeloma or B-cell malignancies respectively. The CrGFRs described herein may be expressed with any known CAR or TCR thus providing the cell with a regulatable growth switch to allow cell expansion/survival in-vitro or in-vivo, and a conventional activation mechanism in the form of the TCR or CAR for anti-cancer activity. Thus the invention provides a cell for use in adoptive cell therapy comprising a CrGFR as described herein and a TCR and/or CAR that specifically binds to a tumour associated antigen.

[0057] The CrGFR may have the TM domain and first IC domain of the human Tpo receptor and a wildtype or truncated Tpo receptor EC domain (without native ligand binding function).

[0058] Particular embodiments of the CrGFR include those shown in FIGS. 1 and 2.

[0059] In some embodiments the growth factor receptor (CrGFR) is constructed such that the CrGFR is based on the TpoR receptor with at least the TM region and IC region (see SEQ ID NO: 1 which shows the TpoR TM domain and 514-635 and TpoR cytoplasmic domain) being retained and with an additional (second) IC domain being added to the construct to enhance signalling in response to Tpo or Tpo agonist binding. Thus in some embodiments the CrGFR comprises: (i) an TpoR extracellular (EC) domain, or a truncated TpoR EC domain; (ii) a thrombopoietin transmembrane (TM) domain; and (iii) a first intracellular (IC) domain comprising a human thrombopoietin IC domain (or a truncated version thereof, e.g delta 60); and (iv) a second intracellular domain, wherein the second intracellular domain is selected from an IC domain from a costimulatory receptor, a cytokine receptor, a cosignalling receptor, or human thrombopoietin receptor (c-mpl). For example, the second IC domain may the IC domain from CD40, IL2R 4243, IL2Rγ), ITAM1 or LMP1.

[0060] In some embodiments the crGFR comprises i) an EC domain; and the TM and IC domains shown in SEQ ID NOS: 3, 4, 5, 6, 7, 8, 9, 10, 11, 12, 13, or 14, or variants thereof having at least 80%, 85%, 90% 95% 97% or 99% sequence identity. Suitable EC domains include those described herein, for example a truncated TpoR EC domain. These receptors retain their ability to bind human thrombopoietin or a thrombopoietin receptor agonist.

[0061] In other embodiments the IC domain of wt Tpo is replaced with an IC domain from a suitable receptor, for example LMP1, IL2R, CD28 or CD137; examples of such constructs are shown in FIG. 1 as and “TpoR. LMP1” “TpoR. IL2rβ-cyt.TpoR-cyt” and FIG. 2 “TpoRec.TpoRtm CD28cyto” and “TpoRec.TpoRtm CD137cyto”.

[0062] The EC domain may be the EC domain from TpoR (SEQ ID NO: 1) or derivative or variant thereof that maintains signalling and cell proliferation in response to ligand binding to the receptor.

[0063] The EC domain may not be required for CrGFR signalling for example if TM domain is used that can cause receptor activation upon ligand binding e.g. the TpoR TM domain. The EC domain may then be a truncated or mutated native domain (e.g. without ligand binding function), for example, a truncated TpoR EC domain. The native EC domain may be replaced by a marker such as truncated CD34 for selection and/or in vivo monitoring.

[0064] The TM domain (shown in FIG. 1) from the Tpo receptor (TpoR) may be used, including a derivative or variant thereof that maintains signalling and cell proliferation in response to ligand binding to the receptor. This may be useful because TpoR is known to have limited expression in normal human tissues and it is also known to bind to Eltrombopag Lusutrombopag and Avatrombopag, thus a CrGFR comprising a TM domain from the Tpo receptor can a be activated by exposing the cells in-vitro or in-vivo to a clinically validated compound with a known toxicity profile.

[0065] The growth factor receptor intracellular (IC) domain (shown in SEQ ID NO: 1) from the Tpo receptor may be used including a derivative or variant thereof that maintains signalling and cell proliferation in response to ligand binding to the receptor (e.g. a truncated TpoR signalling domain such as that shown in SEQ ID NO: 2). This may be combined with the TM domain from the Tpo receptor to achieve good levels of cell proliferation in response to ligand binding.

[0066] Other IC domains that are growth factor receptor like may be suitable for use in constructing the CrGFRs of the present invention, as these receptors are known to activate the same cell signalling pathways as the Tpo receptor. For example, the IC domains from G-CSF, GM-CSF, prolactin or human growth hormone may be used to construct CrGFRs when combined with the TpoR TM domain. The ability of a CrGFR comprising these IC domains to induce cell proliferation in response to a receptor agonist, for example, Eltrombopag, may then be determined using the methods described in the Examples herein. The TpoR IC domain may be truncated by up to 79 amino acids at the C-terminus. Truncations above this have been shown to completely knock out TpoR activity (Gurney et al. PNAS 1995).

[0067] Additionally, the IC domain may also comprise a second domain derived from one of the following (but not limited to): cytokine receptor signalling domains (e.g. IL2 receptor), Cosignalling domains (e.g. CD40), viral oncogenic proteins (e.g. LMP1), costimulatory domains (e.g. CD28, CD137, CD150 etc) or other mitogenic domains (e.g. Toll like receptors, immunoreceptor tyrosine-based activation motifs, CD3 signalling domains etc).

[0068] Cytokine receptors are a broad group of receptors expressed on a multitude of cell types and are involved in sensing extracellular environmental cues by binding to soluble cytokines. This binding event elicits a signalling cascade via JAK/STAT signalling resulting in upregulation of genes involved in survival and expansion. Such receptors include the IL-2 receptor, IL-4 receptor and Thrombopoietin receptor (Liongue et al. 2016). Costimulatory receptors are proteins involved in enhancing the activity of T-cells when the cell receives a primary signal through the T-cell receptor. This is based on the concept of Signal 1 and Signal 2, whereby Signal 1 is delivered through engagement of T-cell receptor with peptide-MHC, and signal 2 is delivered through engagement of costimulatory receptors on the T-cell with costimulatory ligands on the target cells (e.g. dendritic cell). The signal 2 delivered through the costimulatory domain provides crucial survival signals for the T-cell. Common costimulatory receptors include CD28, CD137 and CD150 (Leitner et al. 2010). The term cosignalling defines groups of cell membrane proteins which provide similar supportive signals to those described for costimulatory receptors but under certain circumstances may not normally be considered co-stimulatory as they may not be expressed on T-cells, such receptors include CD40 which is normally expressed in antigen presenting cells where it enhances survival upon engagement of CD40-ligand expressed on T-cells (He et al. 2012; Kumar et al. 2018).

[0069] This second IC domain may be fused directly, or via a linker domain, to the C-terminus of the first IC domain (e.g TpoR IC domain which is disposed next to the transmembrane Tpo domain). Thus the chimeric growth factor receptor may comprise a TpoR transmembrane domain and a TpoR IC domain (first IC domain) and a second IC domain which may be from TpoR, or may be a cytokine receptor signalling domain, Cosignalling domain, viral oncogenic proteins (e.g. LMP1) or costimulatory domains such as those discussed in the preceding paragraph.

[0070] Additionally the costimulatory, coinhibitory or cosignalling domain may be fused directly to the TpoR transmembrane domain to create receptors such as those shown in FIG. 2 and SEQ ID NO: 13 and 14. These receptors may comprise a further (second) IC domain, such as a TpoR domain.

[0071] The cells used in the present invention may be any lymphocyte that is useful in adoptive cell therapy, such as a T-cell or a natural killer (NK) cell, an NKT cell, a gamma/delta T-cell or T regulatory cell. The cells may be allogenic or autologous.

[0072] T cells or T lymphocytes are a type of lymphocyte that have a central role in cell-mediated immunity. They can be distinguished from other lymphocytes, such as B cells and natural killer cells (NK cells), by the presence of a T-cell receptor (TCR) on the cell surface. There are various types of T cell, as summarised below.

[0073] Cytotoxic T cells (TC cells, or CTLs) destroy virally infected cells and tumor cells, and are also implicated in transplant rejection. CTLs express the CD8 molecule at their surface. These cells recognize their targets by binding to antigen associated with WIC class I, which is present on the surface of all nucleated cells. Through IL-10, adenosine and other molecules secreted by regulatory T cells, the CD8+ cells can be inactivated to an anergic state, which prevent autoimmune diseases such as experimental autoimmune encephalomyelitis.

[0074] Memory T cells are a subset of antigen-specific T cells that persist long-term after an infection has resolved. They quickly expand to large numbers of effector T cells upon re-exposure to their cognate antigen, thus providing the immune system with “memory” against past infections. Memory T cells comprise three subtypes: central memory T cells (TCM cells) and two types of effector memory T cells (TEM cells and TEMRA cells). Memory cells may be either CD4+ or CD8+. Memory T cells typically express the cell surface protein CD45RO.

[0075] Regulatory T cells (Treg cells), formerly known as suppressor T cells, are crucial for the maintenance of immunological tolerance. Their major role is to shut down T cell-mediated immunity toward the end of an immune reaction and to suppress auto-reactive T cells that escaped the process of negative selection in the thymus.

[0076] Two major classes of CD4+ Treg cells have been described—naturally occurring Treg cells and adaptive Treg cells.

[0077] Naturally occurring Treg cells (also known as CD4+CD25+FoxP3+ Treg cells) arise in the thymus and have been linked to interactions between developing T cells with both myeloid (CD11c+) and plasmacytoid (CD123+) dendritic cells that have been activated with TSLP. Naturally occurring Treg cells can be distinguished from other T cells by the presence of an intracellular molecule called FoxP3.

[0078] Adaptive Treg cells (also known as Tr1 cells or Th3 cells) may originate during a normal immune response.

[0079] Natural Killer Cells (or NK cells) are a type of cytolytic cell which form part of the innate immune system. NK cells provide rapid responses to innate signals from virally infected cells in an MHC independent manner.

[0080] NK cells (belonging to the group of innate lymphoid cells) are defined as large granular lymphocytes (LGL) and constitute the third kind of cells differentiated from the common lymphoid progenitor generating B and T lymphocytes.

[0081] An aspect of the invention provides a nucleic acid sequence of the invention, encoding any of the CrGFRs, polypeptides, or proteins described herein (including functional portions and functional variants thereof).

[0082] As used herein, the terms “polynucleotide”, “nucleotide”, and “nucleic acid” are intended to be synonymous with each other.

[0083] It will be understood by a skilled person that numerous different polynucleotides and nucleic acids can encode the same polypeptide as a result of the degeneracy of the genetic code. In addition, it is to be understood that skilled persons may, using routine techniques, make nucleotide substitutions that do not affect the polypeptide sequence encoded by the polynucleotides described here to reflect the codon usage of any particular host organism in which the polypeptides are to be expressed, e.g. codon optimisation.

[0084] Nucleic acids according to the invention may comprise DNA or RNA. They may be single-stranded or double-stranded. They may also be polynucleotides which include within them synthetic or modified nucleotides. A number of different types of modification to oligonucleotides are known in the art. These include methylphosphonate and phosphorothioate backbones, addition of acridine or polylysine chains at the 3′ and/or 5′ ends of the molecule. For the purposes of the present invention, it is to be understood that the polynucleotides may be modified by any method available in the art. Such modifications may be carried out in order to enhance the in vivo activity or life span of polynucleotides of interest.

[0085] The terms “variant”, “homologue” or “derivative” in relation to a nucleotide sequence include any substitution of, variation of, modification of, replacement of, deletion of or addition of one (or more) nucleic acid from or to the sequence.

[0086] The nucleic acid sequence may encode the protein sequences shown in SEQ ID NOS: 3 to 14 or variants thereof, including a nucleic acid sequence encoding or comprising a truncated form of the Tpo receptor such as that shown in SEQ ID NO: 2.

[0087] The nucleotide sequence may comprise the nucleotide sequence of TpoR shown in SEQ ID NOS: 17 to 28, or variants thereof.

[0088] The invention also provides a nucleic acid sequence which comprises a nucleic acid sequence encoding a CrGFR and a further nucleic acid sequence encoding a T-cell receptor (TCR) and/or chimeric antigen receptor (CAR).

[0089] The nucleic acid sequences may be joined by a sequence allowing co-expression of the two or more nucleic acid sequences. For example, the construct may comprise an internal promoter, an internal ribosome entry sequence (IRES) sequence or a sequence encoding a cleavage site. The cleavage site may be self-cleaving, such that when the polypeptide is produced, it is immediately cleaved into the discrete proteins without the need for any external cleavage activity.

[0090] Various self-cleaving sites are known, including the Foot-and-Mouth disease virus (FMDV) and the 2a self-cleaving peptide.

[0091] The co-expressing sequence may be an internal ribosome entry sequence (IRES). The co-expressing sequence may be an internal promoter.

[0092] In an aspect, the present invention provides a vector which comprises a nucleic acid sequence or nucleic acid construct of the invention.

[0093] Such a vector may be used to introduce the nucleic acid sequence(s) or nucleic acid construct(s) into a host cell so that it expresses one or more CrGFR(s) according to the first aspect of the invention and, optionally, one or more other proteins of interest (POI), for example a TCR or a CAR.

[0094] The vector may, for example, be a plasmid or a viral vector, such as a retroviral vector or a lentiviral vector, or a transposon based vector or synthetic mRNA. Vectors derived from retroviruses, such as the lentivirus, are suitable tools to achieve long-term gene transfer since they allow long-term, stable integration of a transgene or transgenes and its propagation in daughter cells.

[0095] The vector may be capable of transfecting or transducing a lymphocyte including a T cell or an NK cell.

[0096] The present invention also provides vectors in which a nucleic acid of the present invention is inserted.

[0097] The expression of natural or synthetic nucleic acids encoding a CrGFR, and optionally a TCR or CAR is typically achieved by operably linking a nucleic acid encoding the CrGFR and TCR/CAR polypeptide or portions thereof to one or more promoters, and incorporating the construct into an expression vector. The vectors can be suitable for replication and integration in eukaryotic cells. Typical cloning vectors contain transcription and translation terminators, initiation sequences, and promoters useful for regulation of the expression of the desired nucleic acid sequence.

[0098] Viral vector technology is well known in the art and is described, for example, in Sambrook et al. (2001, Molecular Cloning: A Laboratory Manual, Cold Spring Harbor Laboratory, New York), and in other virology and molecular biology manuals, see also, WO 01/96584; WO 01/29058; and U.S. Pat. No. 6,326,193).

[0099] In some embodiments, the nucleic acid constructs are as shown in the figures herein. In some embodiments the nucleic acids are multicystronic constructs that permit the expression of multiple transgenes (e.g., CrGFR and a TCR and/or CAR etc.) under the control of a single promoter. In some embodiments, the transgenes (e.g., CrGFR and a TCR and/or CAR etc.) are separated by a self-cleaving 2A peptide. Examples of 2A peptides useful in the nucleic acid constructs of the invention include F2A, P2A, T2A and E2A. In other embodiments of the invention, the nucleic acid construct of the invention is a multicystronic construct comprising two promoters; one promoter driving the expression of CrGFR and the other promoter driving the expression of the TCR or CAR. In some embodiments, the dual promoter constructs of the invention are uni-directional. In other embodiments, the dual promoter constructs of the invention are bi-directional.

[0100] In order to assess the expression of the CrGFR polypeptide or portions thereof, the expression vector to be introduced into a cell can also contain either a selectable marker gene or a reporter gene or both to facilitate identification and selection of expressing cells from the population of cells sought to be transfected or transduced through viral vectors. The CrGFR polypeptide may incorporate a marker, such as CD34, as part of the EC domain.

[0101] The present invention also relates to a pharmaceutical composition containing a vector or a CrGFR expressing cell of the invention together with a pharmaceutically acceptable carrier, diluent or excipient, and optionally one or more further pharmaceutically active polypeptides and/or compounds. Such a formulation may, for example, be in a form suitable for intravenous infusion.

[0102] Cells, including T and NK cells, expressing CrGFRs for use in the methods of the present may either be created ex vivo either from a patient's own peripheral blood (autologous), or in the setting of a haematopoietic stem cell transplant from donor peripheral blood or peripheral blood from an unconnected donor (allogenic). Alternatively, T-cells or NK cells may be derived from ex-vivo differentiation of inducible progenitor cells or embryonic progenitor cells to T-cells or NK cells. In these instances, T-cells expressing a CrGFR and, optionally, a CAR and/or TCR, are generated by introducing DNA or RNA coding for the CrGFR and, optionally, a CAR and/or TCR, by one of many means including transduction with a viral vector, transfection with DNA or RNA.

[0103] T or NK cells expressing a CrGFR of the present invention and, optionally, expressing a TCR and/or CAR may be used for the treatment of haemotological cancers or solid tumours.

[0104] A method for the treatment of disease relates to the therapeutic use of a vector or cell, including a T or NK cell, of the invention. In this respect, the vector, or T or NK cell may be administered to a subject having an existing disease or condition in order to lessen, reduce or improve at least one symptom associated with the disease and/or to slow down, reduce or block the progression of the disease. The method of the invention may cause or promote T-cell mediated killing of cancer cells.

[0105] The vector, or T or NK cell according to the present invention may be administered to a patient with one or more additional therapeutic agents. The one or more additional therapeutic agents can be coadministered to the patient. By “coadministering” is meant administering one or more additional therapeutic agents and the vector, or T or NK cell of the present invention sufficiently close in time such that the vector, or T or NK cell can enhance the effect of one or more additional therapeutic agents, or vice versa. In this regard, the vectors or cells can be administered first and the one or more additional therapeutic agents can be administered second, or vice versa. Alternatively, the vectors or cells and the one or more additional therapeutic agents can be administered simultaneously. Suitable therapeutic agents that may be co-administered with the vectors or cells of the present invention include any growth factor receptor agonist that activates the CrGFR, for example, Eltrombopag (rINN, codenamed SB-497115-GR) Lusutrombopag and Avatrombopag or Romiplostim.

[0106] Eltrombopag may be particularly useful in the methods of the invention as its toxicity profile is known. In preclinical studies, the compound was shown to interact selectively with the thrombopoietin receptor, leading to activation of the JAK-STAT signalling pathway and increased proliferation and differentiation of megakaryocytes. Animal studies confirmed that administration could increase platelet counts. In 73 healthy volunteers, higher doses of Eltrombopag caused larger increases in the number of circulating platelets without tolerability problems, see, for example, Jenkins J M, Williams D, Deng Y, Uhl J, Kitchen V, Collins D, Erickson-Miller C L (June 2007). “Phase 1 clinical study of eltrombopag, an oral, nonpeptide thrombopoietin receptor agonist”. Blood 109 (11): 4739-41. Thus in the methods of the invention suitable dosages of Eltrombopag may be determined based on previously published clinical studies and the in-vitro assays described herein.

[0107] Another agent that may be useful is IL-2, as this is currently used in existing cell therapies to boost the activity of administered cells. However, as stated earlier, IL-2 treatment is associated with toxicity and tolerability issues. Thus it is an aim of present invention to stimulate cell proliferation using an agonist that binds to the CrGFR and, therefore, reduce the amount of IL-2 that must be administered (e.g. to levels that are less toxic) or even eliminate the need for IL-2 administration.

[0108] For purposes of the inventive methods, wherein cells are administered to the patient, the cells can be cells that are allogeneic or autologous to the patient.

[0109] Various further aspects and embodiments of the present invention will be apparent to those skilled in the art in view of the present disclosure.

[0110] All documents mentioned in this specification are incorporated herein by reference in their entirety.

[0111] “and/or” where used herein is to be taken as specific disclosure of each of the two specified features or components with or without the other. For example “A and/or B” is to be taken as specific disclosure of each of (i) A, (ii) B and (iii) A and B, just as if each is set out individually herein.

[0112] Unless context dictates otherwise, the descriptions and definitions of the features set out above are not limited to any particular aspect or embodiment of the invention and apply equally to all aspects and embodiments which are described.

[0113] Although the present invention and its advantages have been described in detail, it should be understood that various changes, substitutions and alterations can be made herein without departing from the spirit and scope of the invention as defined in the appended claims.

[0114] The present invention will be further illustrated in the following Examples which are given for illustration purposes only and are not intended to limit the invention in any way.

[0115] Certain aspects and embodiments of the invention will now be illustrated by way of example and with reference to the figures described above and tables described below.

### EXAMPLES

### Example 1—Production and Evaluation of T-Cells Expressing CrGFR

### Materials and Methods

### Plasmids

[0116] The pSF.Lenti.EF1α plasmid was generated by Oxford Genetics by replacing the existing CMV promoter in pSF.Lenti.CMV.PGK.puro with the elongation factor (EF)1α promoter to generate pSF.Lenti.EF1α.PGK.puro. The PGK.Puro segment was then removed by and TpoR constructs cloned in via an XbaI/NheI digestion with the NheI site downstream of the puromycin resistance gene. The packaging plasmids pVSVg, pCgpV and pRSV.Rev (ViraSafe Lentiviral packaging system—Pantropic) were obtained from Cell Biolabs (VPK-206).

### Reagents

[0117] The following reagents were sourced from the following manufacturers:—

[0118] Abcam—DRAQ7 (AB 109202-1 ml)

[0119] Miltenyi Biotec—anti-Melanoma (MCSP)-PE (130-099-413); anti-CD34-APC (130-090-954), anti-CD45-FITC (130-080-202), anti-CD71-APC (130-099-239), anti-CD110-PE

[0120] BD Biosciences—anti-CD34-PE (555822);

[0121] E-Biosciences—Fixable Viability dye eFlor 450 (65-0863-18), Fixable Viability dye eFlor 780 (65-0865-18),

### Cell Lines

[0122] The Jurkat E6.1 cell line and Ba/F3 cell line were cultured in RPMI supplemented with % FCS (F9665-500 ml: Sigma), 1% 1M HEPES (H0887-100 ml) and 1% Penicillin/streptomycin (P0781-100 ml) (T-cell media: TCM). The cell line 293T and was routinely cultured in DMEM supplemented with 10% FCS and 1% Penicillin/streptomycin (P0781-100 ml) (D10).

### T-Cell Isolation

[0123] T-cells were isolated from PBMC from buffy coats. In brief buffy coats were obtained from NHSBT, and PBMC isolated by Ficoll-mediated density centrifugation. Untouched T-cells were isolated using paramagnetic beads (see below). T-cells were cultured in RPMI supplemented with 10% FCS (F9665-500 ml: Sigma), 1% 1M HEPES (H0887-100 ml) and 1% Penicillin/streptomycin (P0781-100 ml) (T-cell media: TCM).

### Lentivirus Production

[0124] 6×10⁶ 293 T cells were plated in 10 ml D10 the day prior to transfection in a poly-d-lysine coated T75 flask (Greiner). On the day of transfection 0.025 M HEPES buffered serum-free DMEM (pH 7.1) and 0.025 M HEPES buffered D10 (pH 7.9) were prepared. 1.5 ml transfection mixes were prepared per flask using 10 μg lentiviral transfer plasmid (pSF.Lenti) and 10 μg each of pVSVg, pCgpV and pRSV.Rev and CaCl2 to a final concentration of 0.05 M in pH7.1 media. Transfection complexes were allowed to form for 30 min before being added dropwise to the flasks containing 6 ml pH7.9 media. 24 h later the media was exchanged for 10 ml fresh D10. 24 and 48 h later the media was harvested, combined and concentrated using Lenti-X concentrator (Clontech-Takara: 631232). Concentrated lentiviral particles were resuspended at 10× the original supernanat volume and stored at −80° C. until use.

### T-Cell Transduction

[0125] 1×10⁵ T-cells were added per well of a flat bottom 96-well plate. The plate was centrifuged and the supernatant aspirated before adding 50-100 μl of lentiviral supernatant supplemented with 4 μg/ml Polybrene (Hexadimethrine bromide—Sigma: H9268-5G) and IL-2 at the indicated concentration. In some instances activation reagents were added: DynabeadsTM Human T-Activator CD3/CD28 (Thermo Fisher: 11131D), DynabeadsTM Human T-Activator CD3/CD28/CD137 (Thermo Fisher 11162D) at the manufacturer recommended concentrations.

### Paramagnetic Bead Sorts

[0126] Paramagnetic bead sorts were conducted as per the manufacturers' instructions using either anti-PE microbeads (Miltenyi Biotec or StemCell Technologies), or T-cell isolation beads (17951: StemCell Technologies).

### Rapid Expansion Protocol (REP)

[0127] T-cells were expanded using irradiated buffy coat feeders. In brief 10 irradiated buffy coats were obtained from NHSBT, PBMC were isolated by Ficoll-mediated density centrifugation, mixed and cryopreserved. Thawed buffy coat feeders were mixed with T-cells at a 1:20-1:100 ratio at a final concentration of cells of 1×10⁶/ml in TCM+200 IU/ml IL-2 and 1 μg/ml phytohaemagglutinin in a T25 culture flask. The upright flask was positioned at 45° angle for the first five days after which the flask was put back upright and the media changed by half media exchange. Media exchanges were performed every 2-3 days with fresh IL-2 added to a final concentration of 200 IU/ml for 14 days after which cells were cryopreserved or put straight into assay.

### Construct Design

[0128] Previously Applicants have validated that the TpoR can have activity in primary human T-cells. However attempts to modify the receptor were not always straightforward. For example fusions between TpoR Ec domain and GCSF IC domain failed to express at the cell surface. Furthermore, Prolactin receptor fusions did not appear to be wholly surface stable. Furthermore, Applicants felt that they could improve the signalling capacity of TpoR-based receptors in T-cells by including signalling components which activate JAK3, a signalling molecule involved in IL-2 signalling but not in TpoR signalling, and therefore more likely to drive IL-2 like signals in engineered cells.

[0129] Applicants therefore aimed to generate fusion receptors wherein additional domains were fused directly to the C-terminus of the TpoR IC domain. Applicants first generated a fusion between TpoR and the IL2rβ signalling domain. Previous attempts at generating fusions between TpoR and IL2rβ by completely removing the TpoR intracellular domain resulted in receptors which did not express sufficiently well. Applicants therefore took an alternative approach where a hybrid TpoR-IL2rβ signalling domain was created whereby the I2rβ signalling region was fused N- or C-terminal to TpoR signalling domain. Next Applicants generated receptors where the cytoplasmic domain of TIAF1, TLR1, CD150, IL2rγ, CD40, LMP1 and ITAM1 from CD3ζ were fused C-terminal to the TpoR signalling domain. The reason for the choice of these receptors was as follows: TIAF1—There is evidence that TIAF1 binds JAK3 (Ji et al. 2000); TLR1/CD40—Synergy between TLRs and CD40 have been shown to induce T-cell expansion (Ahonen et al. 2004), furthermore, CD40 has been shown to bind to JAK3 and require JAK3 for signalling in B-cells (Hanissian & Geha 1997); CD150—There is evidence that CD150 may protect T-cells from IL-2 deprivation (Aversa et al. 1997); ITAM1—Applicants decided to fuse a single ITAM from CD3ζ onto the C-terminus of TpoR in an effort to induce a mitogenic response; LMP1—LMP1 from EBV virus has been shown to interact with JAK3 (Gires et al. 1999), additionally Applicants also fused LMP1 directly to the TpoR transmembrane domain as Applicants felt the TpoR cytoplasmic domain fusion would be quite large and might fail to express sufficiently well. Applicants also generated CrGFR consisting of TpoR extracellular and transmembrane domain fused to the cytoplasmic domain of CD28 and CD137 as Applicants felt these would provide a costimulatory growth signal upon Eltrombopag administration, sequences of these constructs are provided below.

[0130] The constructs were cloned into pSF.Lenti (Oxford Genetics) via an XbaI and NheI site. All fragments and constructs were codon optimised, gene synthesised and cloned by Genewiz.

[0131] Lentiviral Production—Lentiviral production was performed using a three-plasmid packaging system (Cell Biolabs, San Diego, USA) by mixing 10 μg of each plasmid, plus 10 μg of the pSF.Lenti lentiviral plasmid containing the transgene, together in serum free RPMI containing 50 mM CaCl2. The mixture was added dropwise to a 50% confluent monolayer of 293T cells in 75 cm2 flasks. The viral supernatants were collected at 48 and 72 h post transfection, pooled and concentrated using LentiPac lentiviral supernatant concentration (GeneCopoeia, Rockville, Md., USA) solution according to the manufacturer's instructions. Lentiviral supernatants were concentrated 10-fold and used to directly infect primary human T-cells in the presence of 4 μg/ml polybrene (Sigma-Aldrich, Dorset, UK).

[0132] Peripheral blood mononuclear cells were isolated from normal healthy donors before activation for 24 hours with T-cell activation and expansion beads (Invitrogen) according to the manufacturer's instructions before addition of lentiviral supernatants.

[0133] Following expansion cells were washed excessively to remove any exogenous IL2 and plated into 96-well U-bottom plates. Cells were supplemented with IL2 (Proleukin) or Eltrombopag (Stratech Scientific, Suffolk, UK). At various time points thereafter cells were either stained with a 1:400 dilution of eFlor-450 fixable viability dye (eBioscience, UK) and counted directly from the wells using a MACSQuant Cytometer, or were stained with DRAQ7 viability dye plus phycoerythrin conjugated anti-CD110 antibodies (Miltenyi Biotec, UK) and analysed using a MACSQuant cytomter. Cell viability and/or transduction level was then analysed using MACSQuantify software (Miltenyi Biotec, UK).

### Results

[0134] Applicants initially tested the functionality and expression profiles of the CrGFR in comparison to the wt receptor in Jurkat E6.1 and Ba/F3 cells which are human T-cell lymphoma and IL-3 dependent murine B-cell lines respectively. Although Ba/F3 are not human nor a T-cell they would at least show whether the receptors can fold properly and express, and whether they are capable of transmitting a signal. Lentiviral particles were made and used to directly infect Jurkat E6.1 and Ba/F3 cells. The Jurkat cells were analysed after 48 h for expression by use of a PE conjugated anti-CD110 antibody. Ba/F3 cells were incubated with Eltrombopag or murine IL-3 and expression of the CrGFR assessed over a number of days via analysis of CD110 expression by flow cytometry. As FIG. 4 shows all the receptors could be successfully detected in Jurkat E6.1 cells, although three receptors (TpoR.SLAM, TpoR.TIAF1 and TpoR.IL2rβ-cyt.TpoR-cyt) had a low expression profile suggesting they do not express particularly well at the surface. In Ba/F3 cells all the receptors expressed and could be enriched in the population by the addition of Eltrombopag but not IL-3 as predicted (FIG. 5). However, the two IL2rβ fusion receptors—although capable of being enriched in the population—had a poor survival profile in the Ba/F3 and the assay had to be cut short with these receptors due to a lack of viable cells.

[0135] Next Applicants took these receptors and expressed them in primary human T-cells and exposed these cells to IL-2 or Eltrombopag. Three donor primary human T-cell populations were isolated from buffy coats and transduced with the indicated lentiviral constructs in the presence of CD3/CD28 Dynabeads. Following expansion the cells were incubated with IL-2 or Eltrombopag. The results are shown in FIGS. 6, 7 and 8 (×3 donors). Applicants saw an increase in expansion/survival of T-cells with some of the receptors in some of the donors. Applicants analysed this data set overall by looking at the proportion of cells expressing a good proportion of viable cells with a distinct population of CD110+ cells after 21 days. This narrowed Applicants' panel of receptors to analyse further to: TpoR.CD40, TpOR.IL2rγ, TpoR.ITAM1, TpOR.LMP1-cyt, and TpoR.TpoR-cyt-LMP1-cyt. TpoR.A60 also looked good, but Applicants did not pursue this initially with the idea this could be later incorporated into later generation fusion receptors.

[0136] Next Applicants repeated the experiment but sorted the CrGFR+ cells using CD110+ selection by paramagnetic bead selection using the receptors identified from the first round of selections (FIGS. 10, 11 and 12). Applicants observed enhanced survival of T-cells engrafted with the majority of the CrGFR in all three donors. In particular Applicants saw expansion of WT-TpoR, TpOR.CD40, TpOR.IL2rγ and TpoR.LMP1-cyto cells in the second donor (FIG. 12) above that with media alone.

[0137] Applicants next assessed the ability of these receptors to promote survival/expansion in a model of adoptive cell therapy by engineering tumour infiltrating lymphocytes. TIL from patient TIL042 (Uveal melanoma) were engineered with the variant or wt CrGFR and mixed with patient matched tumour cells (CTUM42.1). On days 4 and 7 counts were made of the total cells as well as the CD110+ cells. Applicants found an initial decline in cell numbers, probably driven by AICD or intrinsic inhibitory factors. However between days 4 and 7 Applicants observed an increase in the numbers of CD110+ cells with all the receptors tested with Eltrombopag or Eltrombopag+low dose IL-2. The effect of the TpoR.CD40 in particular was encouraging as it demonstrated no non-specific enrichment in IL2 alone, an effect seen in with the other receptors tested.

[0138] Applicants evaluated further the effect of the CrGFR in ovarian TIL. Three ovarian TIL populations were engineered to express either the WT, or TpoR.CD40, TpoR.IL2rγ or TpoR.LMP1-Cyt variant receptors and mixed with patient matched tumour cells in the presence or absence of Eltrombopag. Counts of total and CD110+ cells were made after 4 and 7 days. Applicants observed specific expansion of the CrGFR+ cells in the presence of tumour between days 4 and 7 in donors 2 and 3 with all the receptors except the TpOR.LMP1.cyt. In donor 1 Applicants found that although there was no specific expansion of CrGFR+ cells, the addition of Eltrombopag appeared to protect the cells from AICD (activation-induced cell death). Importantly Applicants found that in all three donors the activity of the TpoR.IL2rγ and TpoR.CD40 variants was superior to that of the WT receptor (FIG. 13).

[0139] Finally, Applicants validated the signalling potential of the novel CrGFR by conducting phospho STAT analysis upon treatment of CrGFR expressing T-cells with media, cytokine or drug. To this end T-cells from 4 donors were transduced with either the wt TpoR, TpoR. CD40 or TpoR.IL2rγ, enriched for CrGFR expression using paramagnetic bead selection protocols and then expanded using polyclonal stimulation. The cells were treated for four hours with media alone (RPMI), IL-2, Tpo or Eltrombopag (Elt) before methanol fixation, permeabilization and analysis using pSTAT specific antibodies. STAT molecules are the key drivers of cell signalling upon cytokine activation of cells, pSTAT5 in particular is key to IL-2 activity. Indeed Applicants saw induction of pSTAT5 upon IL-2 but not media incubation. IL-12 as a control is unable to induce STAT5 activation as observed in this experiment. Tpo and Eltrombopag in particular showed induction of STAT5 activity. This was most clearly seen with the TpoR.IL2rγ CrGFR demonstrating clear activation of the correct STAT5 activation pathway when stimulated with Eltrombopag.

### Conclusion

[0140] Growth factor receptors responsive to clinically available drugs can be transferred to T-cells by gene transfer technology and therein maintain their functional capacity to deliver cell growth/survival signals. Importantly Applicants show that as an example, TpoR-based CrGFR engrafted primary human T-cells respond to the clinically available drug Eltrombopag and expand and survive in the absence of IL-2 which is normally required for optimal T-cell growth.

[0141] Here Applicants tested a number of functional variants; based on TpoR fused to the signalling domains from a number of costimulatory or cosignalling molecules or other growth factor receptors. Applicants have shown that these receptors confer IL-2 independent growth and survival in primary human T-cells and Tumour Infiltrating Lymphocytes in the presence of the TpoR agonist Eltrombopag. In particular Applicants found that a TpoR.CD40 fusion CrGFR confers very specific Eltrombopag mediated survival/expansion of TIL and shows optimal activity in primary human T-cells.

[0142] Aspects and embodiments of the invention are also set out in the following clauses:

1. A T or NK cell comprising a chimeric recombinant growth factor receptor (CrGFR) comprising:
(i) an extracellular (EC) domain;
(ii) a thrombopoietin transmembrane (TM) domain; and
(iii) a chimeric growth factor receptor intracellular (IC) domain.
2. The T or NK cell according to clause 1 wherein binding of a ligand to the CrGFR induces proliferation of the T or NK cell.
3. The T or NK cell according to clause 2 wherein the ligand is human thrombopoietin, a thrombopoietin receptor agonist, or a tumour associated antigen.
4. The T or NK cell according to clause 3 wherein the thrombopoietin receptor agonist binds to the TM domain.
5. The T or NK cell according to clause 3 or clause 4 wherein the thrombopoietin receptor agonist is selected from Eltrombopag and Romiplostim.
6. The T or NK cell according to the preceding clauses wherein the EC domain comprises the human c-mpl EC domain.
7. The T or NK cell according to the preceding clauses wherein the EC domain comprises one or more of i) a truncated EC domain, ii) a truncated c-mpl EC domain, iii) a domain that binds to a tumour associated antigen, iv) an antibody or antibody fragment that binds to a tumour associated antigen; and v) a selection marker.
8. The T or NK cell according to the preceding clauses wherein the IC domain comprises a costimulatory, coinhibitory or cosignalling domain derived from any costimulatory, coinhibitory or cosignalling molecule such as—but not limited to—CD2, CD27, CD28, CD29, CD134, CD137, CD150, PD1 etc.
9. The T or NK cell according to the preceding clauses wherein the first IC domain is selected from: human growth hormone receptor, human prolactin receptor, human thrombopoietin receptor (c-mpl), G-CSF receptor or GM-CSF receptor.
10. The T or NK cell according to the preceding clauses wherein the additional IC domain is selected from human growth hormone receptor, human prolactin receptor, human thrombopoietin receptor (c-mpl), G-CSF receptor or GM-CSF receptor, or a costimulatory or cosignalling receptor. Additionally, the IC domain also comprises a second domain derived from one of the following (but not limited to): cytokine receptor signalling domains (e.g. IL2 receptor), Cosignalling domains (e.g. CD40), viral oncogenic proteins (e.g. LMP1), costimulatory domains (e.g. CD28, CD137, CD150 etc) or other mitogenic domains (e.g. Toll like receptors, immunoreceptor tyrosine-based activation motifs, CD3 signalling domains etc). This second domain is fused directly, or via a linker domain, to the C- or N-terminus of the TpoR IC domain.
10. The T or NK cell according to the preceding clauses having the human thrombopoietin receptor TM domain or a variant thereof having at least 80% sequence identity which binds human thrombopoietin or a thrombopoietin receptor agonist.
11. The T or NK cell according to the preceding claims, wherein the CrGFR comprises the sequence shown as SEQ ID NO: 3 or a variant thereof having at least 80% sequence identity at the protein level, or with the TpoR IC domain truncated at the C-terminus by up to 79 amino acids, or with an alternative EC domain which maintains ability to respond to a synthetic agonist drug such as Eltrombopag,
12. The T or NK cell according to the preceding claims, wherein the CrGFR comprises the sequence shown as SEQ ID NO: 4 or a variant thereof having at least 80% sequence identity at the protein level, or with the TpoR IC domain truncated by up to 79 amino acids, or with an alternative EC domain which maintains ability to respond to a synthetic agonist drug such as Eltrombopag.
13. The T or NK cell according to the preceding claims, wherein the CrGFR comprises the sequence shown as SEQ ID NO: 5 or a variant thereof having at least 80% sequence identity at the protein level, or with the TpoR IC domain truncated at the C-terminus by up to 79 amino acids, or with an alternative EC domain which maintains ability to respond to a synthetic agonist drug such as Eltrombopag.
14. The T or NK cell according to the preceding claims, wherein the CrGFR comprises the sequence shown as SEQ ID NO: 6 or a variant thereof having at least 80% sequence identity at the protein level, or with the TpoR IC domain truncated at the C-terminus by up to 79 amino acids, or with an alternative EC domain which maintains ability to respond to a synthetic agonist drug such as Eltrombopag.
15. The T or NK cell according to the preceding claims, wherein the CrGFR comprises the sequence shown as SEQ ID NO: 7 or a variant thereof having at least 80% sequence identity at the protein level, or with the TpoR IC domain truncated at the C-terminus by up to 79 amino acids, or with an alternative EC domain which maintains ability to respond to a synthetic agonist drug such as Eltrombopag,
16. The T or NK cell according to the preceding claims, wherein the CrGFR comprises the sequence shown as SEQ ID NO: 8 or a variant thereof having at least 80% sequence identity at the protein level, or with the TpoR IC domain truncated at the C-terminus by up to 79 amino acids, or with an alternative EC domain which maintains ability to respond to a synthetic agonist drug such as Eltrombopag.
17. The T or NK cell according to the preceding claims, wherein the CrGFR comprises the sequence shown as SEQ ID NO: 9 or a variant thereof having at least 80% sequence identity at the protein level, or with the TpoR IC domain truncated at the C-terminus by up to 79 amino acids, or with an alternative EC domain which maintains ability to respond to a synthetic agonist drug such as Eltrombopag.
18. The T or NK cell according to the preceding claims, wherein the CrGFR comprises the sequence shown as SEQ ID NO: 10 or a variant thereof having at least 80% sequence identity at the protein level, or with the TpoR IC domain truncated at the C-terminus by up to 79 amino acids, or with an alternative EC domain which maintains ability to respond to a synthetic agonist drug such as Eltrombopag.
19. The T or NK cell according to the preceding claims, wherein the CrGFR comprises the sequence shown as SEQ ID NO: 11 or a variant thereof having at least 80% sequence identity at the protein level, or with the TpoR IC domain truncated at the C-terminus by up to 79 amino acids, or with an alternative EC domain which maintains ability to respond to a synthetic agonist drug such as Eltrombopag.
20. The T or NK cell according to the preceding claims, wherein the CrGFR comprises the sequence shown as SEQ ID NO: 12 or a variant thereof having at least 80% sequence identity at the protein level, or with the TpoR IC domain truncated at the C-terminus by up to 79 amino acids, or with an alternative EC domain which maintains ability to respond to a synthetic agonist drug such as Eltrombopag.
21. The T or NK cell according to the preceding claims, wherein the CrGFR comprises the sequence shown as SEQ ID NO: 13 or a variant thereof having at least 80% sequence identity at the protein level, or with an alternative EC domain which maintains ability to respond to a synthetic agonist drug such as Eltrombopag.
22. The T or NK cell according to the preceding claims, wherein the CrGFR comprises the sequence shown as SEQ ID NO: 14 or a variant thereof having at least 80% sequence identity at the protein level, or with an alternative EC domain which maintains ability to respond to a synthetic agonist drug such as Eltrombopag.
23. A T or NK cell according to the preceding claims, which comprises the sequence shown in any of SEQ ID NOS: 3 to 14, or a variant thereof which has at least 80% sequence identity but retains the capacity to i) bind to human thrombopoietin, or a human thrombopoietin receptor agonist; and ii) induce cell proliferation or survival.
24. The T cell or NK cell according to any preceding clause which binds to Eltrombopag.
25. The T cell or NK cell according to any preceding clause wherein the T cell is selected from a Tumour Infiltrating Lymphocyte (TIL) a T Regulatory Cell (Treg) or a primary T cell.
26. The T cell or NK cell according to any preceding clause further comprising a recombinant T-cell receptor (TCR) and/or Chimeric Antigen Receptor (CAR).
27. A nucleic acid sequence encoding the CrGFR as defined in any preceding claim.
28. A nucleic acid sequence according to clause 27 which comprises the sequence shown as SEQ ID NOS: 17 to 28 or a variant thereof which does not alter the translated protein sequence.
29—A nucleic acid sequence according to clause 27 which comprises the sequences shown in SEQ ID 3-12 but with the IC domain shown in SEQ ID NO: 2.
30. A vector which comprises a nucleic acid sequence according to clause 27-29, or any variant thereof which does not alter the translated protein sequence.
31. A method for making a T cell or NK cell according to any of clauses 1-26, which comprises the step of introducing a nucleic acid according to clause 27-29, or vector according to clause 19-28, into a T cell or NK cell.
32. A pharmaceutical composition which comprises a vector according to clause 30 or a T or NK cell according to clauses 1-26, together with a pharmaceutically acceptable carrier, diluent or excipient.
33. A method of in-vivo cell expansion comprising administering the cells of clauses 1-26, or pharmaceutical composition of clause 32 to a subject.
34. A method of in-vivo cell expansion according to clause 33 comprising administering thrombopoietin, or a thrombopoietin receptor agonist such as Eltrombopag or Romiplostim, to a subject.
35. A T or NK cell according to any of clauses 1-26, or vector according to clause 30, for use in adoptive cell therapy.
36. A T or NK cell according to any of clauses 1-26, or vector according to clause 30, for use in a method of treating cancer.
37. A method for treating cancer which comprises the step of administering the T cell or NK cell according to any of clauses 1-26 to a subject.
38. The use of a vector according to clause 30 or the T or NK cell according to any of clauses 1-26 in the manufacture of a medicament for treating cancer.
39. Eltrombopag for use in adoptive cell therapy.
40. Eltrombopag for use in the in-vitro or in-vivo expansion of T or NK cells according to any of clauses 1-26.
41. A composition comprising a T or NK cell according to clauses 1 to 26 for use in combination with thrombopoietin or a thrombopoietin receptor agonist in the treatment of a cancer.

### REFERENCES

[0143] Ahonen C L, Doxsee C L, McGurran S M, Riter T R, Wade W F, Barth R J, Vasilakos J P, Noelle R J, Kedl R M. J Exp Med. 2004 Mar. 15; 199(6):775-84. Combined TLR and CD40 triggering induces potent CD8+ T cell expansion with variable dependence on type I IFN.
[0144] Aversa G, Chang C C, Carballido J M, Cocks B G, de Vries J E. J Immunol. 1997 May 1; 158(9):4036-44. Engagement of the signaling lymphocytic activation molecule (SLAM) on activated T cells results in IL-2-independent, cyclosporin A-sensitive T cell proliferation and IFN-gamma production.
[0145] Columbyova L, Loda M, Scadden D T. Cancer Res. 1995 Aug. 15; 55(16):3509-12. Thrombopoietin receptor expression in human cancer cell lines and primary tissues.
[0146] Grupp S A, Kalos M, Barrett D, Aplenc R, Porter D L, Rheingold S R, Teachey D T, Chew A, Hauck B, Wright J F, Milone M C, Levine B L, June C H. N Engl J Med. 2013 Apr. 18; 368(16):1509-18. Chimeric antigen receptor-modified T cells for acute lymphoid leukemia.
[0147] Erickson-Miller C L, Delorme E, Tian S S, Hopson C B, Landis A J, Valoret E I, Sellers T S, Rosen J, Miller S G, Luengo J I, Duffy K J, Jenkins J M.
[0148] Stem Cells. 2009 February; 27(2):424-30. Preclinical activity of eltrombopag (SB-497115), an oral, nonpeptide thrombopoietin receptor agonist.
[0149] Fox N E, Lim J, Chen R, Geddis A E. Exp Hematol. 2010 May; 38(5):384-91. F104S c-Mpl responds to a transmembrane domain-binding thrombopoietin receptor agonist: proof of concept that selected receptor mutations in congenital amegakaryocytic thrombocytopenia can be stimulated with alternative thrombopoietic agents.
[0150] Gires O, Kohlhuber F, Kilger E, Baumann M, Kieser A, Kaiser C, Zeidler R, Scheffer B, Ueffing M, Hammerschmidt W. EMBO J. 1999 Jun. 1; 18(11):3064-73. Latent membrane protein 1 of Epstein-Barr virus interacts with JAK3 and activates STAT proteins.
[0151] Hanissian S H, Geha R S. Immunity. 1997 April; 6(4):379-87. Jak3 is associated with CD40 and is critical for CD40 induction of gene expression in B cells.
[0152] Kawahara M, Kimura H, Ueda H, Nagamune T. Biochem Biophys Res Commun. 2004 Feb. 27; 315(1):132-8. Selection of genetically modified cell population using hapten-specific antibody/receptor chimera.
[0153] Kochenderfer J N, Dudley M E, Kassim S H, Somerville R P, Carpenter R O, Stetler-Stevenson M, Yang J C, Phan G Q, Hughes M S, Sherry R M, Raffeld M, Feldman S, Lu L, Li Y F, Ngo L T, Goy A, Feldman T, Spaner D E, Wang M L, Chen C C, Kranick S M, Nath A, Nathan D A, Morton K E, Toomey M A, Rosenberg S A. J Clin Oncol. 2015 33(6):540-9. Chemotherapy-refractory diffuse large B-cell lymphoma and indolent B-cell malignancies can be effectively treated with autologous T cells expressing an anti-CD19 chimeric antigen receptor.
[0154] Jin L, Zeng H, Chien S, Otto K G, Richard R E, Emery D W, Blau C A. Nat Genet. 2000 September; 26(1):64-6. In vivo selection using a cell-growth switch.
[0155] Ji H, Zhai Q, Zhu J, Yan M, Sun L, Liu X, Zheng Z. A novel protein MAJN binds to Jak3 and inhibits apoptosis induced by IL-2 deprival. Biochem Biophys Res Commun. 2000 Apr. 2; 270(1):267-71.
[0156] Kawahara M, Chen J, Sogo T, Teng J, Otsu M, Onodera M, Nakauchi H, Ueda H, Nagamune T. Cytokine. 2011 September; 55(3):402-8. Growth promotion of genetically modified hematopoietic progenitors using an antibody/c-Mpl chimera.
[0157] Morgan R A, Dudley M E, Wunderlich J R, Hughes M S, Yang J C, Sherry R M, Royal R E, Topalian S L, Kammula U S, Restifo N P, Zheng Z, Nahvi A, de Vries C R, Rogers-Freezer L J, Mavroukakis S A, Rosenberg S A. Science. 2006 Oct. 6; 314(5796):126-9. Cancer regression in patients after transfer of genetically engineered lymphocytes.
[0158] Nagashima T, Ueda Y, Hanazono Y, Kume A, Shibata H, Ageyama N, Terao K, Ozawa K, Hasegawa M. J Gene Med. 2004 January; 6(1):22-31. In vivo expansion of gene-modified hematopoietic cells by a novel selective amplifier gene utilizing the erythropoietin receptor as a molecular switch.
[0159] Nishimura C D, Brenner D A, Mukherjee M, Hirsch R A, Ott L, Wu M F, Liu H, Dakhova O, Orange J S, Brenner M K, Lin C Y, Arber C. Blood. 2017 Dec. 21; 130(25):2739-2749. c-A/IPL provides tumor-targeted T-cell receptor-transgenic T cells with costimulation and cytokine signals.
[0160] Rapoport A P, Stadtmauer E A, Binder-Scholl G K, Goloubeva O, Vogl D T, Lacey S F, Badros A Z, Garfall A, Weiss B, Finklestein J, Kulikovskaya I, Sinha S K, Kronsberg S, Gupta M, Bond S, Melchiori L, Brewer J E, Bennett A D, Gerry A B, Pumphrey N J, Williams D, Tayton-Martin HK, Ribeiro L, Holdich T, Yanovich S, Hardy N, Yared J, Kerr N, Philip S, Westphal S, Siegel D L, Levine B L, Jakobsen B K, Kalos M, June C H. Nat Med. 2015 August; 21(8):914-21. NY-ESO-1-specific TCR-engineered T cells mediate sustained antigen-specific antitumor effects in myeloma.
[0161] Richard R E, Wood B, Zeng H, Jin L, Papayannopoulou T, Blau C A. Blood. 2000 Jan. 15; 95(2):430-6. Expansion of genetically modified primary human hemopoietic cells using chemical inducers of dimerization.
[0162] Rosenberg S A, Yang J C, Sherry R M, Kammula U S, Hughes M S, Phan G Q, Citrin D E, Restifo N P, Robbins P F, Wunderlich J R, Morton K E, Laurencot C M, Steinberg S M, White D E, Dudley M E. Clin Cancer Res. 2011 Jul. 1; 17(13):4550-7. Durable complete responses in heavily pretreated patients with metastatic melanoma using T-cell transfer immunotherapy.
[0163] Saka K, Kawahara M, Teng J, Otsu M, Nakauchi H, Nagamune T. J Biotechnol. 2013 December; 168(4):659-65. Top-down motif engineering of a cytokine receptor for directing ex vivo expansion of hematopoietic stem cells.
[0164] Saka K, Kawahara M, Ueda H, Nagamune T. Biotechnol Bioeng. 2012 June; 109(6):1528-37. Activation of target signal transducers utilizing chimeric receptors with signaling-molecule binding motifs.
[0165] Yamane N, Tanaka Y, Ohyabu N, Yamane S, Maekawa K, Ishizaki J, Suzuki R, Itoh T, Takemoto H. Eur J Pharmacol. 2008 May 31; 586(1-3):44-51. Characterization of novel non-peptide thrombopoietin mimetics, their species specificity and the activation mechanism of the thrombopoietin receptor.

### Sequences

[0166] In the amino acid sequences below, bold indicates TpoR derived sequence.

[0167] In the nucleotide sequences below, degenerate bases are indicated using the standard IUPAC code:

| IUPAC | | IUPAC | |
|---|---|---|---|
| nucleotide code | Base | nucleotide code | Base |
| A | Adenine | K | G or T |
| C | Cytosine | M | A or C |
| G | Guanine | B | C or G or T |
| T (or U) | Thymine (or Uracil) | D | A or G or T |
| R | A or G | H | A or C or T |
| Y | C or T | V | A or C or G |
| S | G or C | N | any base |
| W | A or T | . or - | gap |

** denotes Stop codons

[0168] Transmembrane domain underlined (in SEQ ID NOS: 1 to 15).

[0169] SEQ ID NO: 1: Wild type TpoR.

[0170] 635 amino acids presented in the N- to C-terminus direction, of which 1-491 (bold): TpoR extracellular domain, 492-513 (bold, underlined): TpoR TM domain, 514-635 (bold, italics): TpoR cytoplasmic domain.

MPSWALFMVTSCLLLAPQNLAQVSSQDVSLLASDSEPLKCFSRTFEDLT
CFWDEEEAAPSGTYQLLYAYPREKPRACPLSSQSMPHFGTRYVCQFPDQ
EEVRLFFPLHLWVKNVFLNQTRTQRVLFVDSVGLPAPPSIIKAMGGSQP
GELQISWEEPAPEISDFLRYELRYGPRDPKNSTGPTVIQLIATETCCPA
LQRPHSASALDQSPCAQPTMPWQDGPKQTSPSREASALTAEGGSCLISG
LQPGNSYWLQLRSEPDGISLGGSWGSWSLPVTVDLPGDAVALGLQCFTL
DLKNVTCQWQQQDHASSQGFFYHSRARCCPRDRYPIWENCEEEEKTNPG
LQTPQFSRCHFKSRNDSIIHILVEVTTAPGTVHSYLGSPFWIHQAVRLP
TPNLHWREISSGHLELEWQHPSSWAAQETCYQLRYTGEGHQDWKVLEPP
LGARGGTLELRPRSRYRLQLRARLNGPTYQGPWSSWSDPTRVETATETA
WISLVTALHLVLGLSAVLGLLLL

[symbol]

[symbol]

[symbol]

[symbol]

[symbol]

[symbol]

[symbol]

[symbol]

[symbol]

**
SEQ ID NO: 15: Wild type TpoR
atgccnwsntgggcnytnttyatggtnacnwsntgyytnytnytngcnc
cncaraayytngcncargtnwsnwsncargaygtnwsnytnytngcnws
ngaywsngarccnytnaartgyttywsnmgnacnttygargayytnacn
tgyttytgggaygargargargcngcnccnwsnggnacntaycarytny
tntaygcntayccnmgngaraarccnmgngcntgyccnytnwsnwsnca
rwsnatgccncayttyggnacnmgntaygtntgycarttyccngaycar
gargargtnmgnytnttyttyccnytncayytntgggtnaaraaygtnt
tyytnaaycaracnmgnacncarmgngtnytnttygtngaywsngtngg
nytnccngcnccnccnwsnathathaargcnatgggnggnwsncarccn
ggngarytncarathwsntgggargarccngcnccngarathwsngayt
tyytnmgntaygarytnmgntayggnccnmgngayccnaaraaywsnac
nggnccnacngtnathcarytnathgcnacngaracntgytgyccngcn
ytncarmgnccncaywsngcnwsngcnytngaycarwsnccntgygcnc
arccnacnatgccntggcargayggnccnaarcaracnwsnccnwsnmg
ngargcnwsngcnytnacngcngarggnggnwsntgyytnathwsnggn
ytncarccnggnaaywsntaytggytncarytnmgnwsngarccngayg
gnathwsnytnggnggnwsntggggnwsntggwsnytnccngtnacngt
ngayytnccnggngaygcngtngcnytnggnytncartgyttyacnytn
gayytnaaraaygtnacntgycartggcarcarcargaycaygcnwsnw
sncarggnttyttytaycaywsnmgngcnmgntgytgyccnmgngaymg
ntayccnathtgggaraaytgygargargargaraaracnaayccnggn
ytncaracnccncarttywsnmgntgycayttyaarwsnmgnaaygayw
snathathcayathytngtngargtnacnacngcnccnggnacngtnca
ywsntayytnggnwsnccnttytggathcaycargcngtnmgnytnccn
acnccnaayytncaytggmgngarathwsnwsnggncayytngarytng
artggcarcayccnwsnwsntgggcngcncargaracntgytaycaryt
nmgntayacnggngarggncaycargaytggaargtnytngarccnccn
ytnggngcnmgnggnggnacnytngarytnmgnccnmgnwsnmgntaym
gnytncarytnmgngcnmgnytnaayggnccnacntaycarggnccntg
gwsnwsntggwsngayccnacnmgngtngaracngcnacngaracngcn
tggathwsnytngtnacngcnytncayytngtnytnggnytnwsngcng
tnytnggnytnytnytnytnmgntggcarttyccngcncaytaymgnmg
nytnmgncaygcnytntggccnwsnytnccngayytncaymgngtnytn
ggncartayytnmgngayacngcngcnytnwsnccnccnaargcnacng
tnwsngayacntgygargargtngarccnwsnytnytngarathytncc
naarwsnwsngarmgnacnccnytnccnytntgywsnwsncargcncar
atggaytaymgnmgnytncarccnwsntgyytnggnacnatgccnytnw
sngtntgyccnccnatggcngarwsnggnwsntgytgyacnacncayat
hgcnaaycaywsntayytnccnytnwsntaytggcarcarccntrrtrr

[0171] SEQ ID NO: 2: TpoR.Δ60

[0172] 580 amino acids presented in the N- to C-terminus direction, of which 1-491 (bold): TpoR extracellular domain, 492-513 (bold, underlined): TpoR TM domain, 514-580 (bold, italics): TpoR cytoplasmic domain with C-terminal truncation.

MPSWALFMVTSCLLLAPQNLAQVSSQDVSLLASDSEPLKCFSRTFEDLTC
FWDEEEAAPSGTYQLLYAYPREKPRACPLSSQSMPHFGTRYVCQFPDQEE
VRLFFPLHLWVKNVFLNQTRTQRVLFVDSVGLPAPPSIIKAMGGSQPGEL
QISWEEPAPEISDFLRYELRYGPRDPKNSTGPTVIQLIATETCCPALQRP
HSASALDQSPCAQPTMPWQDGPKQTSPSREASALTAEGGSCLISGLQPGN
SYWLQLRSEPDGISLGGSWGSWSLPVTVDLPGDAVALGLQCFTLDLKNVT
CQWQQQDHASSQGFFYHSRARCCPRDRYPIWENCEEEEKTNPGLQTPQFS
RCHFKSRNDSIIHILVEVTTAPGTVHSYLGSPFWIHQAVRLPTPNLHWRE
ISSGHLELEWQHPSSWAAQETCYQLRYTGEGHQDWKVLEPPLGARGGTLE
LRPRSRYRLQLRARLNGPTYQGPWSSWSDPTRVETATETAWISLVTALHL
VLGLSAVLGLLLL [symbol] [symbol] [symbol] [symbol] [symbol] [symbol]
**
SEQ ID NO: 16: TpoR.Δ60
atgccnwsntgggcnytnttyatggtnacnwsntgyytnytnytngcncc
ncaraayytngcncargtnwsnwsncargaygtnwsnytnytngcnwsng
aywsngarccnytnaartgyttywsnmgnacnttygargayytnacntgy
ttytgggaygargargargcngcnccnwsnggnacntaycarytnytnta
ygcntayccnmgngaraarccnmgngcntgyccnytnwsnwsncarwsna
tgccncayttyggnacnmgntaygtntgycarttyccngaycargargar
gtnmgnytnttyttyccnytncayytntgggtnaaraaygtnttyytnaa
ycaracnmgnacncarmgngtnytnttygtngaywsngtnggnytnccng
cnccnccnwsnathathaargcnatgggnggnwsncarccnggngarytn
carathwsntgggargarccngcnccngarathwsngayttyytnmgnta
ygarytnmgntayggnccnmgngayccnaaraaywsnacnggnccnacng
tnathcarytnathgcnacngaracntgytgyccngcnytncarmgnccn
caywsngcnwsngcnytngaycarwsnccntgygcncarccnacnatgcc
ntggcargayggnccnaarcaracnwsnccnwsnmgngargcnwsngcny
tnacngcngarggnggnwsntgyytnathwsnggnytncarccnggnaay
wsntaytggytncarytnmgnwsngarccngayggnathwsnytnggngg
nwsntggggnwsntggwsnytnccngtnacngtngayytnccnggngayg
cngtngcnytnggnytncartgyttyacnytngayytnaaraaygtnacn
tgycartggcarcarcargaycaygcnwsnwsncarggnttyttytayca
ywsnmgngcnmgntgytgyccnmgngaymgntayccnathtgggaraayt
gygargargargaraaracnaayccnggnytncaracnccncarttywsn
mgntgycayttyaarwsnmgnaaygaywsnathathcayathytngtnga
rgtnacnacngcnccnggnacngtncaywsntayytnggnwsnccnttyt
ggathcaycargcngtnmgnytnccnacnccnaayytncaytggmgngar
athwsnwsnggncayytngarytngartggcarcayccnwsnwsntgggc
ngcncargaracntgytaycarytnmgntayacnggngarggncaycarg
aytggaargtnytngarccnccnytnggngcnmgnggnggnacnytngar
ytnmgnccnmgnwsnmgntaymgnytncarytnmgngcnmgnytnaaygg
nccnacntaycarggnccntggwsnwsntggwsngayccnacnmgngtng
aracngcnacngaracngcntggathwsnytngtnacngcnytncayytn
gtnytnggnytnwsngcngtnytnggnytnytnytnytnmgntggcartt
yccngcncaytaymgnmgnytnmgncaygcnytntggccnwsnytnccng
ayytncaymgngtnytnggncartayytnmgngayacngcngcnytnwsn
ccnccnaargcnacngtnwsngayacntgygargargtngarccnwsnyt
nytngarathytnccnaarwsnwsngarmgnacnccnytntrrtrr

[0173] SEQ ID NO: 3: TpoR-cyt.IL2rβ-cyt

[0174] 626 amino acids presented in the N- to C-terminus direction, of which 1-491 (bold): TpoR extracellular domain, 492-513 (bold, underlined): TpoR TM domain, 514-538 (bold, italics): TpoR cytoplasmic domain with C-terminal truncation, 539-626 (unformatted): IL2rβ cytoplasmic domain.

MPSWALFMVTSCLLLAPQNLAQVSSQDVSLLASDSEPLKCFSRTFEDLTC
FWDEEEAAPSGTYQLLYAYPREKPRACPLSSQSMPHFGTRYVCQFPDQEE
VRLFFPLHLWVKNVFLNQTRTQRVLFVDSVGLPAPPSIIKAMGGSQPGEL
QISWEEPAPEISDFLRYELRYGPRDPKNSTGPTVIQLIATETCCPALQRP
HSASALDQSPCAQPTMPWQDGPKQTSPSREASALTAEGGSCLISGLQPGN
SYWLQLRSEPDGISLGGSWGSWSLPVTVDLPGDAVALGLQCFTLDLKNVT
CQWQQQDHASSQGFFYHSRARCCPRDRYPIWENCEEEEKTNPGLQTPQFS
RCHFKSRNDSIIHILVEVTTAPGTVHSYLGSPFWIHQAVRLPTPNLHWRE
ISSGHLELEWQHPSSWAAQETCYQLRYTGEGHQDWKVLEPPLGARGGTLE
LRPRSRYRLQLRARLNGPTYQGPWSSWSDPTRVETATETAWISLVTALHL
VLGLSAVLGLLLL [symbol] [symbol] PRDWDPQPLGP
PTPGVPDLVDFQPPPELVLREAGEEVPDAGPREGVSFPWSRPPGQGEFRA
LNARLPLNTDAYLSLQELQGQDPTHLV**
SEQ ID NO: 17: TpoR.TpoR-cyt.IL2rβ-cyt
atgccnwsntgggcnytnttyatggtnacnwsntgyytnytnytngcncc
ncaraayytngcncargtnwsnwsncargaygtnwsnytnytngcnwsng
aywsngarccnytnaartgyttywsnmgnacnttygargayytnacntgy
ttytgggaygargargargcngcnccnwsnggnacntaycarytnytnta
ygcntayccnmgngaraarccnmgngcntgyccnytnwsnwsncarwsna
tgccncayttyggnacnmgntaygtntgycarttyccngaycargargar
gtnmgnytnttyttyccnytncayytntgggtnaaraaygtnttyytnaa
ycaracnmgnacncarmgngtnytnttygtngaywsngtnggnytnccng
cnccnccnwsnathathaargcnatgggnggnwsncarccnggngarytn
carathwsntgggargarccngcnccngarathwsngayttyytnmgnta
ygarytnmgntayggnccnmgngayccnaaraaywsnacnggnccnacng
tnathcarytnathgcnacngaracntgytgyccngcnytncarmgnccn
caywsngcnwsngcnytngaycarwsnccntgygcncarccnacnatgcc
ntggcargayggnccnaarcaracnwsnccnwsnmgngargcnwsngcny
tnacngcngarggnggnwsntgyytnathwsnggnytncarccnggnaay
wsntaytggytncarytnmgnwsngarccngayggnathwsnytnggngg
nwsntggggnwsntggwsnytnccngtnacngtngayytnccnggngayg
cngtngcnytnggnytncartgyttyacnytngayytnaaraaygtnacn
tgycartggcarcarcargaycaygcnwsnwsncarggnttyttytayca
ywsnmgngcnmgntgytgyccnmgngaymgntayccnathtgggaraayt
gygargargargaraaracnaayccnggnytncaracnccncarttywsn
mgntgycayttyaarwsnmgnaaygaywsnathathcayathytngtnga
rgtnacnacngcnccnggnacngtncaywsntayytnggnwsnccnttyt
ggathcaycargcngtnmgnytnccnacnccnaayytncaytggmgngar
athwsnwsnggncayytngarytngartggcarcayccnwsnwsntgggc
ngcncargaracntgytaycarytnmgntayacnggngarggncaycarg
aytggaargtnytngarccnccnytnggngcnmgnggnggnacnytngar
ytnmgnccnmgnwsnmgntaymgnytncarytnmgngcnmgnytnaaygg
nccnacntaycarggnccntggwsnwsntggwsngayccnacnmgngtng
aracngcnacngaracngcntggathwsnytngtnacngcnytncayytn
gtnytnggnytnwsngcngtnytnggnytnytnytnytnmgntggcartt
yccngcncaytaymgnmgnytnmgncaygcnytntggccnwsnytnccng
ayytncaymgngtnccnmgngaytgggayccncarccnytnggnccnccn
acnccnggngtnccngayytngtngayttycarccnccnccngarytngt
nytnmgngargcnggngargargtnccngaygcnggnccnmgngarggng
tnwsnttyccntggwsnmgnccnccnggncarggngarttymgngcnytn
aaygcnmgnytnccnytnaayacngaygcntayytnwsnytncargaryt
ncarggncargayccnacncayytngtntrrtrr

[0175] SEQ ID NO: 4: TpoR IL2rB-cyt.TpoR-cyt

[0176] 808 amino acids presented in the N- to C-terminus direction, of which 1-491 (bold): TpoR extracellular domain, 492-513 (bold, underlined): TpoR TM domain, 514-709 (unformatted): IL2rB cytoplasmic domain, 710-808 (bold, italics): TpoR cytoplasmic domain with N-terminal truncation.

MPSWALFMVTSCLLLAPQNLAQVSSQDVSLLASDSEPLKCFSRTFEDLTC
FWDEEEAAPSGTYQLLYAYPREKPRACPLSSQSMPHFGTRYVCQFPDQEE
VRLFFPLHLWVKNVFLNQTRTQRVLFVDSVGLPAPPSIIKAMGGSQPGEL
QISWEEPAPEISDFLRYELRYGPRDPKNSTGPTVIQLIATETCCPALQRP
HSASALDQSPCAQPTMPWQDGPKQTSPSREASALTAEGGSCLISGLQPGN
SYWLQLRSEPDGISLGGSWGSWSLPVTVDLPGDAVALGLQCFTLDLKNVT
CQWQQQDHASSQGFFYHSRARCCPRDRYPIWENCEEEEKTNPGLQTPQFS
RCHFKSRNDSIIHILVEVTTAPGTVHSYLGSPFWIHQAVRLPTPNLHWRE
ISSGHLELEWQHPSSWAAQETCYQLRYTGEGHQDWKVLEPPLGARGGTLE
LRPRSRYRLQLRARLNGPTYQGPWSSWSDPTRVETATETAWISLVTALHL
VLGLSAVLGLLLLNCRNTGPWLKKVLKCNTPDPSKFFSQLSSEHGGDVQK
WLSSPFPSSSFSPGGLAPEISPLEVLERDKVTQLLLQQDKVPEPASLSSN
HSLTSCFTNQGYFFFHLPDALEIEACQVYFTYDPYSEEDPDEGVAGAPTG
SSPQPLQPLSGEDDAYCTFPSRDDLLLFSPSLLGGPSPPSTAPGGSGAGE
ERMPPSLQE

[symbol]

[symbol]

[symbol]

[symbol]

[symbol]

[symbol]

[symbol]

[symbol]

[symbol]

**
SEQ ID NO: 18: TpoR.IL2rB-cyt.TpoR-cyt
atgccnwsntgggcnytnttyatggtnacnwsntgyytnytnytngcncc
ncaraayytngcncargtnwsnwsncargaygtnwsnytnytngcnwsng
aywsngarccnytnaartgyttywsnmgnacnttygargayytnacntgy
ttytgggaygargargargcngcnccnwsnggnacntaycarytnytnta
ygcntayccnmgngaraarccnmgngcntgyccnytnwsnwsncarwsna
tgccncayttyggnacnmgntaygtntgycarttyccngaycargargar
gtnmgnytnttyttyccnytncayytntgggtnaaraaygtnttyytnaa
ycaracnmgnacncarmgngtnytnttygtngaywsngtnggnytnccng
cnccnccnwsnathathaargcnatgggnggnwsncarccnggngarytn
carathwsntgggargarccngcnccngarathwsngayttyytnmgnta
ygarytnmgntayggnccnmgngayccnaaraaywsnacnggnccnacng
tnathcarytnathgcnacngaracntgytgyccngcnytncarmgnccn
caywsngcnwsngcnytngaycarwsnccntgygcncarccnacnatgcc
ntggcargayggnccnaarcaracnwsnccnwsnmgngargcnwsngcny
tnacngcngarggnggnwsntgyytnathwsnggnytncarccnggnaay
wsntaytggytncarytnmgnwsngarccngayggnathwsnytnggngg
nwsntggggnwsntggwsnytnccngtnacngtngayytnccnggngayg
cngtngcnytnggnytncartgyttyacnytngayytnaaraaygtnacn
tgycartggcarcarcargaycaygcnwsnwsncarggnttyttytayca
ywsnmgngcnmgntgytgyccnmgngaymgntayccnathtgggaraayt
gygargargargaraaracnaayccnggnytncaracnccncarttywsn
mgntgycayttyaarwsnmgnaaygaywsnathathcayathytngtnga
rgtnacnacngcnccnggnacngtncaywsntayytnggnwsnccnttyt
ggathcaycargcngtnmgnytnccnacnccnaayytncaytggmgngar
athwsnwsnggncayytngarytngartggcarcayccnwsnwsntgggc
ngcncargaracntgytaycarytnmgntayacnggngarggncaycarg
aytggaargtnytngarccnccnytnggngcnmgnggnggnacnytngar
ytnmgnccnmgnwsnmgntaymgnytncarytnmgngcnmgnytnaaygg
nccnacntaycarggnccntggwsnwsntggwsngayccnacnmgngtng
aracngcnacngaracngcntggathwsnytngtnacngcnytncayytn
gtnytnggnytnwsngcngtnytnggnytnytnytnytnaaytgymgnaa
yacnggnccntggytnaaraargtnytnaartgyaayacnccngayccnw
snaarttyttywsncarytnwsnwsngarcayggnggngaygtncaraar
tggytnwsnwsnccnttyccnwsnwsnwsnttywsnccnggnggnytngc
nccngarathwsnccnytngargtnytngarmgngayaargtnacncary
tnytnytncarcargayaargtnccngarccngcnwsnytnwsnwsnaay
caywsnytnacnwsntgyttyacnaaycarggntayttyttyttycayyt
nccngaygcnytngarathgargcntgycargtntayttyacntaygayc
cntaywsngargargayccngaygarggngtngcnggngcnccnacnggn
wsnwsnccncarccnytncarccnytnwsnggngargaygaygcntaytg
yacnttyccnwsnmgngaygayytnytnytnttywsnccnwsnytnytng
gnggnccnwsnccnccnwsnacngcnccnggnggnwsnggngcnggngar
garmgnatgccnccnwsnytncargarmgngtnytnggncartayytnmg
ngayacngcngcnytnwsnccnccnaargcnacngtnwsngayacntgyg
argargtngarccnwsnytnytngarathytnccnaarwsnwsngarmgn
acnccnytnccnytntgywsnwsncargcncaratggaytaymgnmgnyt
ncarccnwsntgyytnggnacnatgccnytnwsngtntgyccnccnatgg
cngarwsnggnwsntgytgyacnacncayathgcnaaycaywsntayytn
ccnytnwsntaytggcarcarccntrrtrr

[0177] SEQ ID NO: 5: TpoR SLAM

[0178] 710 amino acids presented in the N- to C-terminus direction, of which 1-491 (bold): TpoR extracellular domain, 492-513 (bold, underlined): TpoR TM domain, 514-635 (bold, italics): TpoR cytoplasmic domain, 636-710 (unformatted): SLAM cytoplasmic domain.

MPSWALFMVTSCLLLAPQNLAQVSSQDVSLLASDSEPLKCFSRTFEDLTC
FWDEEEAAPSGTYQLLYAYPREKPRACPLSSQSMPHFGTRYVCQFPDQEE
VRLFFPLHLWVKNVFLNQTRTQRVLFVDSVGLPAPPSIIKAMGGSQPGEL
QISWEEPAPEISDFLRYELRYGPRDPKNSTGPTVIQLIATETCCPALQRP
HSASALDQSPCAQPTMPWQDGPKQTSPSREASALTAEGGSCLISGLQPGN
SYWLQLRSEPDGISLGGSWGSWSLPVTVDLPGDAVALGLQCFTLDLKNVT
CQWQQQDHASSQGFFYHSRARCCPRDRYPIWENCEEEEKTNPGLQTPQFS
RCHFKSRNDSIIHILVEVTTAPGTVHSYLGSPFWIHQAVRLPTPNLHWRE
ISSGHLELEWQHPSSWAAQETCYQLRYTGEGHQDWKVLEPPLGARGGTLE
LRPRSRYRLQLRARLNGPTYQGPWSSWSDPTRVETATETAWISLVTALHL
VLGLSAVLGLLLL

[symbol]

[symbol]

[symbol]

[symbol]

[symbol]

[symbol]

[symbol]

[symbol]

[symbol]

[symbol]

RRRGKTNHYQTTVEKKSLTIYAQVQKPGPLQKKLDSFPAQDPCTTIYVAA
TEPVPESVQETNSITVYASVTLPES**
SEQ ID NO: 19: TpoR.SLAM
atgccnwsntgggcnytnttyatggtnacnwsntgyytnytnytngcncc
ncaraayytngcncargtnwsnwsncargaygtnwsnytnytngcnwsng
aywsngarccnytnaartgyttywsnmgnacnttygargayytnacntgy
ttytgggaygargargargcngcnccnwsnggnacntaycarytnytnta
ygcntayccnmgngaraarccnmgngcntgyccnytnwsnwsncarwsna
tgccncayttyggnacnmgntaygtntgycarttyccngaycargargar
gtnmgnytnttyttyccnytncayytntgggtnaaraaygtnttyytnaa
ycaracnmgnacncarmgngtnytnttygtngaywsngtnggnytnccng
cnccnccnwsnathathaargcnatgggnggnwsncarccnggngarytn
carathwsntgggargarccngcnccngarathwsngayttyytnmgnta
ygarytnmgntayggnccnmgngayccnaaraaywsnacnggnccnacng
tnathcarytnathgcnacngaracntgytgyccngcnytncarmgnccn
caywsngcnwsngcnytngaycarwsnccntgygcncarccnacnatgcc
ntggcargayggnccnaarcaracnwsnccnwsnmgngargcnwsngcny
tnacngcngarggnggnwsntgyytnathwsnggnytncarccnggnaay
wsntaytggytncarytnmgnwsngarccngayggnathwsnytnggngg
nwsntggggnwsntggwsnytnccngtnacngtngayytnccnggngayg
cngtngcnytnggnytncartgyttyacnytngayytnaaraaygtnacn
tgycartggcarcarcargaycaygcnwsnwsncarggnttyttytayca
ywsnmgngcnmgntgytgyccnmgngaymgntayccnathtgggaraayt
gygargargargaraaracnaayccnggnytncaracnccncarttywsn
mgntgycayttyaarwsnmgnaaygaywsnathathcayathytngtnga
rgtnacnacngcnccnggnacngtncaywsntayytnggnwsnccnttyt
ggathcaycargcngtnmgnytnccnacnccnaayytncaytggmgngar
athwsnwsnggncayytngarytngartggcarcayccnwsnwsntgggc
ngcncargaracntgytaycarytnmgntay acnggngarggncaycar
gaytggaargtnytngarccnccnytnggngcnmgnggnggnacnytnga
rytnmgnccnmgnwsnmgntaymgnytncarytnmgngcnmgnytnaayg
gnccnacntaycarggnccntggwsnwsntggwsngayccnacnmgngtn
garacngcnacngaracngcntggathwsnytngtnacngcnytncayyt
ngtnytnggnytnwsngcngtnytnggnytnytnytnytnmgntggcart
tyccngcncaytaymgnmgnytnmgncaygcnytntggccnwsnytnccn
gayytncaymgngtnytnggncartayytnmgngayacngcngcnytnws
nccnccnaargcnacngtnwsngayacntgygargargtngarccnwsny
tnytngarathytnccnaarwsnwsngarmgnacnccnytnccnytntgy
wsnwsncargcncaratggaytaymgnmgnytncarccnwsntgyytngg
nacnatgccnytnwsngtntgyccnccnatggcngarwsnggnwsntgyt
gyacnacncayathgcnaaycaywsntayytnccnytnwsntaytggcar
carccnmgnmgnmgnggnaaracnaaycaytaycaracnacngtngaraa
raarwsnytnacnathtaygcncargtncaraarccnggnccnytncara
araarytngaywsnttyccngcncargayccntgyacnacnathtaygtn
gcngcnacngarccngtnccngarwsngtncargaracnaaywsnathac
ngtntaygcnwsngtnacnytnccngarwsntrrtrr

[0179] SEQ ID NO: 6: TpoR.IL2rγ

[0180] 721 amino acids presented in the N- to C-terminus direction, of which 1-491 (bold): TpoR extracellular domain, 492-513 (bold, underlined): TpoR TM domain, 514-635 (bold, italics): TpoR cytoplasmic domain, 636-721 (unformatted): IL2rγ cytoplasmic domain.

MPSWALFMVTSCLLLAPQNLAQVSSQDVSLLASDSEPLKCFSRTFEDLTC
FWDEEEAAPSGTYQLLYAYPREKPRACPLSSQSMPHFGTRYVCQFPDQEE
VRLFFPLHLWVKNVFLNQTRTQRVLFVDSVGLPAPPSIIKAMGGSQPGEL
QISWEEPAPEISDFLRYELRYGPRDPKNSTGPTVIQLIATETCCPALQRP
HSASALDQSPCAQPTMPWQDGPKQTSPSREASALTAEGGSCLISGLQPGN
SYWLQLRSEPDGISLGGSWGSWSLPVTVDLPGDAVALGLQCFTLDLKNVT
CQWQQQDHASSQGFFYHSRARCCPRDRYPIWENCEEEEKTNPGLQTPQFS
RCHFKSRNDSIIHILVEVTTAPGTVHSYLGSPFWIHQAVRLPTPNLHWRE
ISSGHLELEWQHPSSWAAQETCYQLRYTGEGHQDWKVLEPPLGARGGTLE
LRPRSRYRLQLRARLNGPTYQGPWSSWSDPTRVETATETAWISLVTALHL
VLGLSAVLGLLLL

[symbol]

[symbol]

[symbol]

[symbol]

[symbol]

[symbol]

[symbol]

[symbol]

[symbol]

[symbol]

ERTMPRIPTLKNLEDLVTEYHGNFSAWSGVSKGLAESLQPDYSERLCLVS
EIPPKGGALGEGPGASPCNQHSPYWAPPCYTLKPET**
SEQ ID NO: 20: TpoR.IL2rγ
atgccnwsntgggcnytnttyatggtnacnwsntgyytnytnytngcncc
ncaraayytngcncargtnwsnwsncargaygtnwsnytnytngcnwsng
aywsngarccnytnaartgyttywsnmgnacnttygargayytnacntgy
ttytgggaygargargargcngcnccnwsnggnacntaycarytnytnta
ygcntayccnmgngaraarccnmgngcntgyccnytnwsnwsncarwsna
tgccncayttyggnacnmgntaygtntgycarttyccngaycargargar
gtnmgnytnttyttyccnytncayytntgggtnaaraaygtnttyytnaa
ycaracnmgnacncarmgngtnytnttygtngaywsngtnggnytnccng
cnccnccnwsnathathaargcnatgggnggnwsncarccnggngarytn
carathwsntgggargarccngcnccngarathwsngayttyytnmgnta
ygarytnmgntayggnccnmgngayccnaaraaywsnacnggnccnacng
tnathcarytnathgcnacngaracntgytgyccngcnytncarmgnccn
caywsngcnwsngcnytngaycarwsnccntgygcncarccnacnatgcc
ntggcargayggnccnaarcaracnwsnccnwsnmgngargcnwsngcny
tnacngcngarggnggnwsntgyytnathwsnggnytncarccnggnaay
wsntaytggytncarytnmgnwsngarccngayggnathwsnytnggngg
nwsntggggnwsntggwsnytnccngtnacngtngayytnccnggngayg
cngtngcnytnggnytncartgyttyacnytngayytnaaraaygtnacn
tgycartggcarcarcargaycaygcnwsnwsncarggnttyttytayca
ywsnmgngcnmgntgytgyccnmgngaymgntayccnathtgggaraayt
gygargargargaraaracnaayccnggnytncaracnccncarttywsn
mgntgycayttyaarwsnmgnaaygaywsnathathcayathytngtnga
rgtnacnacngcnccnggnacngtncaywsntayytnggnwsnccnttyt
ggathcaycargcngtnmgnytnccnacnccnaayytncaytggmgngar
athwsnwsnggncayytngarytngartggcarcayccnwsnwsntgggc
ngcncargaracntgytaycarytnmgntayacnggngarggncaycarg
aytggaargtnytngarccnccnytnggngcnmgnggnggnacnytngar
ytnmgnccnmgnwsnmgntaymgnytncarytnmgngcnmgnytnaaygg
nccnacntaycarggnccntggwsnwsntggwsngayccnacnmgngtng
aracngcnacngaracngcntggathwsnytngtnacngcnytncayytn
gtnytnggnytnwsngcngtnytnggnytnytnytnytnmgntggcartt
yccngcncaytaymgnmgnytnmgncaygcnytntggccnwsnytnccng
ayytncaymgngtnytnggncartayytnmgngayacngcngcnytnwsn
ccnccnaargcnacngtnwsngayacntgygargargtngarccnwsnyt
nytngarathytnccnaarwsnwsngarmgnacnccnytnccnytntgyw
snwsncargcncaratggaytaymgnmgnytncarccnwsntgyytnggn
acnatgccnytnwsngtntgyccnccnatggcngarwsnggnwsntgytg
yacnacncayathgcnaaycaywsntayytnccnytnwsntaytggcarc
arccngarmgnacnatgccnmgnathccnacnytnaaraayytngargay
ytngtnacngartaycayggnaayttywsngcntggwsnggngtnwsnaa
rggnytngcngarwsnytncarccngaytaywsngarmgnytntgyytng
tnwsngarathccnccnaarggnggngcnytnggngarggnccnggngcn
wsnccntgyaaycarcaywsnccntaytgggcnccnccntgytayacnyt
naarccngaracntrrtrr

[0181] SEQ ID NO: 7: TpoR-TLR1

[0182] 817 amino acids presented in the N- to C-terminus direction, of which 1-491 (bold): TpoR extracellular domain, 492-513 (bold, underlined): TpoR TM domain, 514-635 (bold, italics): TpoR cytoplasmic domain, 636-817 (unformatted): TLR1 cytoplasmic domain.

MPSWALFMVTSCLLLAPQNLAQVSSQDVSLLASDSEPLKCFSRTFEDLTC
FWDEEEAAPSGTYQLLYAYPREKPRACPLSSQSMPHFGTRYVCQFPDQEE
VRLFFPLHLWVKNVFLNQTRTQRVLFVDSVGLPAPPSIIKAMGGSQPGEL
QISWEEPAPEISDFLRYELRYGPRDPKNSTGPTVIQLIATETCCPALQRP
HSASALDQSPCAQPTMPWQDGPKQTSPSREASALTAEGGSCLISGLQPGN
SYWLQLRSEPDGISLGGSWGSWSLPVTVDLPGDAVALGLQCFTLDLKNVT
CQWQQQDHASSQGFFYHSRARCCPRDRYPIWENCEEEEKTNPGLQTPQFS
RCHFKSRNDSIIHILVEVTTAPGTVHSYLGSPFWIHQAVRLPTPNLHWRE
ISSGHLELEWQHPSSWAAQETCYQLRYTGEGHQDWKVLEPPLGARGGTLE
LRPRSRYRLQLRARLNGPTYQGPWSSWSDPTRVETATETAWISLVTALHL
VLGLSAVLGLLLL

[symbol]

[symbol]

[symbol]

[symbol]

[symbol]

[symbol]

[symbol]

[symbol]

[symbol]

[symbol]

DLPWYLRMVCQWTQTRRRARNIPLEELQRNLQFH
AFISYSGHDSFWVKNELLPNLEKEGMQICLHERNFVPGKSIVENIITCI
EKSYKSIFVLSPNFVQSEWCHYELYFAHHNLFHEGSNSLILILLEPIPQ
YSIPSSYEIKLKSLMARRTYLEWPKEKSKRGLFWANLRAAINIKLTEQA
KK**
SEQ ID NO: 21: TpoR-TLR1
atgccnwsntgggcnytnttyatggtnacnwsntgyytnytnytngcncc
ncaraayytngcncargtnwsnwsncargaygtnwsnytnytngcnwsng
aywsngarccnytnaartgyttywsnmgnacnttygargayytnacntgy
ttytgggaygargargargcngcnccnwsnggnacntaycarytnytnta
ygcntayccnmgngaraarccnmgngcntgyccnytnwsnwsncarwsna
tgccncayttyggnacnmgntaygtntgycarttyccngaycargargar
gtnmgnytnttyttyccnytncayytntgggtnaaraaygtnttyytnaa
ycaracnmgnacncarmgngtnytnttygtngaywsngtnggnytnccng
cnccnccnwsnathathaargcnatgggnggnwsncarccnggngarytn
carathwsntgggargarccngcnccngarathwsngayttyytnmgnta
ygarytnmgntayggnccnmgngayccnaaraaywsnacnggnccnacng
tnathcarytnathgcnacngaracntgytgyccngcnytncarmgnccn
caywsngcnwsngcnytngaycarwsnccntgygcncarccnacnatgcc
ntggcargayggnccnaarcaracnwsnccnwsnmgngargcnwsngcny
tnacngcngarggnggnwsntgyytnathwsnggnytncarccnggnaay
wsntaytggytncarytnmgnwsngarccngayggnathwsnytnggngg
nwsntggggnwsntggwsnytnccngtnacngtngayytnccnggngayg
cngtngcnytnggnytncartgyttyacnytngayytnaaraaygtnacn
tgycartggcarcarcargaycaygcnwsnwsncarggnttyttytayca
ywsnmgngcnmgntgytgyccnmgngaymgntayccnathtgggaraayt
gygargargargaraaracnaayccnggnytncaracnccncarttywsn
mgntgycayttyaarwsnmgnaaygaywsnathathcayathytngtnga
rgtnacnacngcnccnggnacngtncaywsntayytnggnwsnccnttyt
ggathcaycargcngtnmgnytnccnacnccnaayytncaytggmgngar
athwsnwsnggncayytngarytngartggcarcayccnwsnwsntgggc
ngcncargaracntgytaycarytnmgntayacnggngarggncaycarg
aytggaargtnytngarccnccnytnggngcnmgnggnggnacnytngar
ytnmgnccnmgnwsnmgntaymgnytncarytnmgngcnmgnytnaaygg
nccnacntaycarggnccntggwsnwsntggwsngayccnacnmgngtng
aracngcnacngaracngcntggathwsnytngtnacngcnytncayytn
gtnytnggnytnwsngcngtnytnggnytnytnytnytnmgntggcartt
yccngcncaytaymgnmgnytnmgncaygcnytntggccnwsnytnccng
ayytncaymgngtnytnggncartayytnmgngayacngcngcnytnwsn
ccnccnaargcnacngtnwsngayacntgygargargtngarccnwsnyt
nytngarathytnccnaarwsnwsngarmgnacnccnytnccnytntgyw
snwsncargcncaratggaytaymgnmgnytncarccnwsntgyytnggn
acnatgccnytnwsngtntgyccnccnatggcngarwsnggnwsntgytg
yacnacncayathgcnaaycaywsntayytnccnytnwsntaytggcarc
arccngayytnccntggtayytnmgnatggtntgycartggacncaracn
mgnmgnmgngcnmgnaayathccnytngargarytncarmgnaayytnca
rttycaygcnttyathwsntaywsnggncaygaywsnttytgggtnaara
aygarytnytnccnaayytngaraargarggnatgcarathtgyytncay
garmgnaayttygtnccnggnaarwsnathgtngaraayathathacntg
yathgaraarwsntayaarwsnathttygtnytnwsnccnaayttygtnc
arwsngartggtgycaytaygarytntayttygcncaycayaayytntty
caygarggnwsnaaywsnytnathytnathytnytngarccnathccnca
rtaywsnathccnwsnwsntaycayaarytnaarwsnytnatggcnmgnm
gnacntayytngartggccnaargaraarwsnaarmgnggnytnttytgg
gcnaayytnmgngcngcnathaayathaarytnacngarcargcnaaraa
rtrrtrr

[0183] SEQ ID NO: 8: TpoR-TIAF1

[0184] 750 amino acids presented in the N- to C-terminus direction, of which 1-491 (bold): TpoR extracellular domain, 492-513 (bold, underlined): TpoR TM domain, 514-635 (bold, italics): TpoR cytoplasmic domain, 636-750 (unformatted): TIAF1 cytoplasmic domain.

MPSWALFMVTSCLLLAPQNLAQVSSQDVSLLASDSEPLKCFSRTFEDLTC
FWDEEEAAPSGTYQLLYAYPREKPRACPLSSQSMPHFGTRYVCQFPDQEE
VRLFFPLHLWVKNVFLNQTRTQRVLFVDSVGLPAPPSIIKAMGGSQPGEL
QISWEEPAPEISDFLRYELRYGPRDPKNSTGPTVIQLIATETCCPALQRP
HSASALDQSPCAQPTMPWQDGPKQTSPSREASALTAEGGSCLISGLQPGN
SYWLQLRSEPDGISLGGSWGSWSLPVTVDLPGDAVALGLQCFTLDLKNVT
CQWQQQDHASSQGFFYHSRARCCPRDRYPIWENCEEEEKTNPGLQTPQFS
RCHFKSRNDSIIHILVEVTTAPGTVHSYLGSPFWIHQAVRLPTPNLHWRE
ISSGHLELEWQHPSSWAAQETCYQLRYTGEGHQDWKVLEPPLGARGGTLE
LRPRSRYRLQLRARLNGPTYQGPWSSWSDPTRVETATETAWISLVTALHL
VLGLSAVLGLLLL

[symbol]

[symbol]

[symbol]

[symbol]

[symbol]

[symbol]

[symbol]

[symbol]

[symbol]

[symbol]

MSSPSSPFREQ
SFLCAAGDAGEESRVQVLKNEVRRGSPVLLGWVEQAYADKCVCGPSAPPA
PTPPSLSQRVMCNDLFKVNPFQLQQFRADPSTASLLLCPGGLDHKLNLRG
KAWG**
SEQ ID NO: 22: TpoR-TIAF1
atgccnwsntgggcnytnttyatggtnacnwsntgyytnytnytngcncc
ncaraayytngcncargtnwsnwsncargaygtnwsnytnytngcnwsng
aywsngarccnytnaartgyttywsnmgnacnttygargayytnacntgy
ttytgggaygargargargcngcnccnwsnggnacntaycarytnytnta
ygcntayccnmgngaraarccnmgngcntgyccnytnwsnwsncarwsna
tgccncayttyggnacnmgntaygtntgycarttyccngaycargargar
gtnmgnytnttyttyccnytncayytntgggtnaaraaygtnttyytnaa
ycaracnmgnacncarmgngtnytnttygtngaywsngtnggnytnccng
cnccnccnwsnathathaargcnatgggnggnwsncarccnggngarytn
carathwsntgggargarccngcnccngarathwsngayttyytnmgnta
ygarytnmgntayggnccnmgngayccnaaraaywsnacnggnccnacng
tnathcarytnathgcnacngaracntgytgyccngcnytncarmgnccn
caywsngcnwsngcnytngaycarwsnccntgygcncarccnacnatgcc
ntggcargayggnccnaarcaracnwsnccnwsnmgngargcnwsngcny
tnacngcngarggnggnwsntgyytnathwsnggnytncarccnggnaay
wsntaytggytncarytnmgnwsngarccngayggnathwsnytnggngg
nwsntggggnwsntggwsnytnccngtnacngtngayytnccnggngayg
cngtngcnytnggnytncartgyttyacnytngayytnaaraaygtnacn
tgycartggcarcarcargaycaygcnwsnwsncarggnttyttytayca
ywsnmgngcnmgntgytgyccnmgngaymgntayccnathtgggaraayt
gygargargargaraaracnaayccnggnytncaracnccncarttywsn
mgntgycayttyaarwsnmgnaaygaywsnathathcayathytngtnga
rgtnacnacngcnccnggnacngtncaywsntayytnggnwsnccnttyt
ggathcaycargcngtnmgnytnccnacnccnaayytncaytggmgngar
athwsnwsnggncayytngarytngartggcarcayccnwsnwsntgggc
ngcncargaracntgytaycarytnmgntayacnggngarggncaycarg
aytggaargtnytngarccnccnytnggngcnmgnggnggnacnytngar
ytnmgnccnmgnwsnmgntaymgnytncarytnmgngcnmgnytnaaygg
nccnacntaycarggnccntggwsnwsntggwsngayccnacnmgngtng
aracngcnacngaracngcntggathwsnytngtnacngcnytncayytn
gtnytnggnytnwsngcngtnytnggnytnytnytnytnmgntggcartt
yccngcncaytaymgnmgnytnmgncaygcnytntggccnwsnytnccng
ayytncaymgngtnytnggncartayytnmgngayacngcngcnytnwsn
ccnccnaargcnacngtnwsngayacntgygargargtngarccnwsnyt
nytngarathytnccnaarwsnwsngarmgnacnccnytnccnytntgyw
snwsncargcncaratggaytaymgnmgnytncarccnwsntgyytnggn
acnatgccnytnwsngtntgyccnccnatggcngarwsnggnwsntgytg
yacnacncayathgcnaaycaywsntayytnccnytnwsntaytggcarc
arccnatgwsnwsnccnwsnwsnccnttymgngarcarwsnttyytntgy
gcngcnggngaygcnggngargarwsnmgngtncargtnytnaaraayga
rgtnmgnmgnggnwsnccngtnytnytnggntgggtngarcargcntayg
cngayaartgygtntgyggnccnwsngcnccnccngcnccnacnccnccn
wsnytnwsncarmgngtnatgtgyaaygayytnttyaargtnaayccntt
ycarytncarcarttymgngcngayccnwsnacngcnwsnytnytnytnt
gyccnggnggnytngaycayaarytnaayytnmgnggnaargcntggggn
trrtrr

[0185] SEQ ID NO: 9: TpoR-CD40

[0186] 697 amino acids presented in the N- to C-terminus direction, of which 1-491 (bold): TpoR extracellular domain, 492-513 (bold, underlined): TpoR TM domain, 514-635 (bold, italics): TpoR cytoplasmic domain, 636-697 (unformatted): CD40 cytoplasmic domain.

MPSWALFMVTSCLLLAPQNLAQVSSQDVSLLASDSEPLKCFSRTFEDLTC
FWDEEEAAPSGTYQLLYAYPREKPRACPLSSQSMPHFGTRYVCQFPDQEE
VRLFFPLHLWVKNVFLNQTRTQRVLFVDSVGLPAPPSIIKAMGGSQPGEL
QISWEEPAPEISDFLRYELRYGPRDPKNSTGPTVIQLIATETCCPALQRP
HSASALDQSPCAQPTMPWQDGPKQTSPSREASALTAEGGSCLISGLQPGN
SYWLQLRSEPDGISLGGSWGSWSLPVTVDLPGDAVALGLQCFTLDLKNVT
CQWQQQDHASSQGFFYHSRARCCPRDRYPIWENCEEEEKTNPGLQTPQFS
RCHFKSRNDSIIHILVEVTTAPGTVHSYLGSPFWIHQAVRLPTPNLHWRE
ISSGHLELEWQHPSSWAAQETCYQLRYTGEGHQDWKVLEPPLGARGGTLE
LRPRSRYRLQLRARLNGPTYQGPWSSWSDPTRVETATETAWISLVTALHL
VLGLSAVLGLLLL

[symbol]

[symbol]

[symbol]

[symbol]

[symbol]

[symbol]

[symbol]

[symbol]

[symbol]

[symbol]

KKVAKKPTNKAPHPKQEPQEINFPDDLPGSNTAAPVQETLHGCQPVTQED
GKESRISVQERQ**
SEQ ID NO: 23: TpoR-CD40
atgccnwsntgggcnytnttyatggtnacnwsntgyytnytnytngcncc
ncaraayytngcncargtnwsnwsncargaygtnwsnytnytngcnwsng
aywsngarccnytnaartgyttywsnmgnacnttygargayytnacntgy
ttytgggaygargargargcngcnccnwsnggnacntaycarytnytnta
ygcntayccnmgngaraarccnmgngcntgyccnytnwsnwsncarwsna
tgccncayttyggnacnmgntaygtntgycarttyccngaycargargar
gtnmgnytnttyttyccnytncayytntgggtnaaraaygtnttyytnaa
ycaracnmgnacncarmgngtnytnttygtngaywsngtnggnytnccng
cnccnccnwsnathathaargcnatgggnggnwsncarccnggngarytn
carathwsntgggargarccngcnccngarathwsngayttyytnmgnta
ygarytnmgntayggnccnmgngayccnaaraaywsnacnggnccnacng
tnathcarytnathgcnacngaracntgytgyccngcnytncarmgnccn
caywsngcnwsngcnytngaycarwsnccntgygcncarccnacnatgcc
ntggcargayggnccnaarcaracnwsnccnwsnmgngargcnwsngcny
tnacngcngarggnggnwsntgyytnathwsnggnytncarccnggnaay
wsntaytggytncarytnmgnwsngarccngayggnathwsnytnggngg
nwsntggggnwsntggwsnytnccngtnacngtngayytnccnggngayg
cngtngcnytnggnytncartgyttyacnytngayytnaaraaygtnacn
tgycartggcarcarcargaycaygcnwsnwsncarggnttyttytayca
ywsnmgngcnmgntgytgyccnmgngaymgntayccnathtgggaraayt
gygargargargaraaracnaayccnggnytncaracnccncarttywsn
mgntgycayttyaarwsnmgnaaygaywsnathathcayathytngtnga
rgtnacnacngcnccnggnacngtncaywsntayytnggnwsnccnttyt
ggathcaycargcngtnmgnytnccnacnccnaayytncaytggmgngar
athwsnwsnggncayytngarytngartggcarcayccnwsnwsntgggc
ngcncargaracntgytaycarytnmgntayacnggngarggncaycarg
aytggaargtnytngarccnccnytnggngcnmgnggnggnacnytngar
ytnmgnccnmgnwsnmgntaymgnytncarytnmgngcnmgnytnaaygg
nccnacntaycarggnccntggwsnwsntggwsngayccnacnmgngtng
aracngcnacngaracngcntggathwsnytngtnacngcnytncayytn
gtnytnggnytnwsngcngtnytnggnytnytnytnytnmgntggcartt
yccngcncaytaymgnmgnytnmgncaygcnytntggccnwsnytnccng
ayytncaymgngtnytnggncartayytnmgngayacngcngcnytnwsn
ccnccnaargcnacngtnwsngayacntgygargargtngarccnwsnyt
nytngarathytnccnaarwsnwsngarmgnacnccnytnccnytntgyw
snwsncargcncaratggaytaymgnmgnytncarccnwsntgyytnggn
acnatgccnytnwsngtntgyccnccnatggcngarwsnggnwsntgytg
yacnacncayathgcnaaycaywsntayytnccnytnwsntaytggcarc
arccnaaraargtngcnaaraarccnacnaayaargcnccncayccnaar
cargarccncargarathaayttyccngaygayytnccnggnwsnaayac
ngcngcnccngtncargaracnytncayggntgycarccngtnacncarg
argayggnaargarwsnmgnathwsngtncargarmgncartrrtrr

[0187] SEQ ID NO: 10: TpoR-ITAM1

[0188] 676 amino acids presented in the N- to C-terminus direction, of which 1-491 (bold): TpoR extracellular domain, 492-513 (bold, underlined): TpoR TM domain, 514-635 (bold, italics): TpoR cytoplasmic domain, 636-676 (unformatted): ITAM1 cytoplasmic domain.

MPSWALFMVTSCLLLAPQNLAQVSSQDVSLLASDSEPLKCFSRTFEDLTC
FWDEEEAAPSGTYQLLYAYPREKPRACPLSSQSMPHFGTRYVCQFPDQEE
VRLFFPLHLWVKNVFLNQTRTQRVLFVDSVGLPAPPSIIKAMGGSQPGEL
QISWEEPAPEISDFLRYELRYGPRDPKNSTGPTVIQLIATETCCPALQRP
HSASALDQSPCAQPTMPWQDGPKQTSPSREASALTAEGGSCLISGLQPGN
SYWLQLRSEPDGISLGGSWGSWSLPVTVDLPGDAVALGLQCFTLDLKNVT
CQWQQQDHASSQGFFYHSRARCCPRDRYPIWENCEEEEKTNPGLQTPQFS
RCHFKSRNDSIIHILVEVTTAPGTVHSYLGSPFWIHQAVRLPTPNLHWRE
ISSGHLELEWQHPSSWAAQETCYQLRYTGEGHQDWKVLEPPLGARGGTLE
LRPRSRYRLQLRARLNGPTYQGPWSSWSDPTRVETATETAWISLVTALHL
VLGLSAVLGLLLL

[symbol]

[symbol]

[symbol]

[symbol]

[symbol]

[symbol]

[symbol]

[symbol]

[symbol]

[symbol]

RVKFSRSADAPAYQQGQNQLYNELNLGRREEYDVLDKRRGR**
SEQ ID NO: 24: TpoR-ITAM1
atgccnwsntgggcnytnttyatggtnacnwsntgyytnytnytngcncc
ncaraayytngcncargtnwsnwsncargaygtnwsnytnytngcnwsng
aywsngarccnytnaartgyttywsnmgnacnttygargayytnacntgy
ttytgggaygargargargcngcnccnwsnggnacntaycarytnytnta
ygcntayccnmgngaraarccnmgngcntgyccnytnwsnwsncarwsna
tgccncayttyggnacnmgntaygtntgycarttyccngaycargargar
gtnmgnytnttyttyccnytncayytntgggtnaaraaygtnttyytnaa
ycaracnmgnacncarmgngtnytnttygtngaywsngtnggnytnccng
cnccnccnwsnathathaargcnatgggnggnwsncarccnggngarytn
carathwsntgggargarccngcnccngarathwsngayttyytnmgnta
ygarytnmgntayggnccnmgngayccnaaraaywsnacnggnccnacng
tnathcarytnathgcnacngaracntgytgyccngcnytncarmgnccn
caywsngcnwsngcnytngaycarwsnccntgygcncarccnacnatgcc
ntggcargayggnccnaarcaracnwsnccnwsnmgngargcnwsngcny
tnacngcngarggnggnwsntgyytnathwsnggnytncarccnggnaay
wsntaytggytncarytnmgnwsngarccngayggnathwsnytnggngg
nwsntggggnwsntggwsnytnccngtnacngtngayytnccnggngayg
cngtngcnytnggnytncartgyttyacnytngayytnaaraaygtnacn
tgycartggcarcarcargaycaygcnwsnwsncarggnttyttytayca
ywsnmgngcnmgntgytgyccnmgngaymgntayccnathtgggaraayt
gygargargargaraaracnaayccnggnytncaracnccncarttywsn
mgntgycayttyaarwsnmgnaaygaywsnathathcayathytngtnga
rgtnacnacngcnccnggnacngtncaywsntayytnggnwsnccnttyt
ggathcaycargcngtnmgnytnccnacnccnaayytncaytggmgngar
athwsnwsnggncayytngarytngartggcarcayccnwsnwsntgggc
ngcncargaracntgytaycarytnmgntayacnggngarggncaycarg
aytggaargtnytngarccnccnytnggngcnmgnggnggnacnytngar
ytnmgnccnmgnwsnmgntaymgnytncarytnmgngcnmgnytnaaygg
nccnacntaycarggnccntggwsnwsntggwsngayccnacnmgngtng
aracngcnacngaracngcntggathwsnytngtnacngcnytncayytn
gtnytnggnytnwsngcngtnytnggnytnytnytnytnmgntggcartt
yccngcncaytaymgnmgnytnmgncaygcnytntggccnwsnytnccng
ayytncaymgngtnytnggncartayytnmgngayacngcngcnytnwsn
ccnccnaargcnacngtnwsngayacntgygargargtngarccnwsnyt
nytngarathytnccnaarwsnwsngarmgnacnccnytnccnytntgyw
snwsncargcncaratggaytaymgnmgnytncarccnwsntgyytnggn
acnatgccnytnwsngtntgyccnccnatggcngarwsnggnwsntgytg
yacnacncayathgcnaaycaywsntayytnccnytnwsntaytggcarc
arccnmgngtnaarttywsnmgnwsngcngaygcnccngcntaycarcar
ggncaraaycarytntayaaygarytnaayytnggnmgnmgngargarta
ygaygtnytngayaarmgnmgnggnmgntrrtrr

[0189] SE0 ID NO: 11: TpoR TpoR-cyt LMP1-cyt

[0190] 836 amino acids presented in the N- to C-terminus direction, of which 1-491 (bold): TpoR extracellular domain, 492-513 (bold, underlined): TpoR TM domain, 514-635 (bold, italics): TpoR cytoplasmic domain, 636-836 (unformatted): LMP-1 cytoplasmic domain.

MPSWALFMVTSCLLLAPQNLAQVSSQDVSLLASDSEPLKCFSRTFEDLTC
FWDEEEAAPSGTYQLLYAYPREKPRACPLSSQSMPHFGTRYVCQFPDQEE
VRLFFPLHLWVKNVFLNQTRTQRVLFVDSVGLPAPPSIIKAMGGSQPGEL
QISWEEPAPEISDFLRYELRYGPRDPKNSTGPTVIQLIATETCCPALQRP
HSASALDQSPCAQPTMPWQDGPKQTSPSREASALTAEGGSCLISGLQPGN
SYWLQLRSEPDGISLGGSWGSWSLPVTVDLPGDAVALGLQCFTLDLKNVT
CQWQQQDHASSQGFFYHSRARCCPRDRYPIWENCEEEEKTNPGLQTPQFS
RCHFKSRNDSIIHILVEVTTAPGTVHSYLGSPFWIHQAVRLPTPNLHWRE
ISSGHLELEWQHPSSWAAQETCYQLRYTGEGHQDWKVLEPPLGARGGTLE
LRPRSRYRLQLRARLNGPTYQGPWSSWSDPTRVETATETAWISLVTALHL
VLGLSAVLGLLLL

[symbol]

[symbol]

[symbol]

[symbol]

[symbol]

[symbol]

[symbol]

[symbol]

[symbol]

[symbol]

YHGQRHSDEHHHDDSLPHPQQATDDSGHESDSNSNEGRHEILLVSGAGDG
PPLCSQNLGAPGGGPDNGPQDPDNTDDNGPQDPDNTDDNGPHDPLPQDPD
NTDDNGPQDPDNTDDNGPHDPLPHSPSDSAGNDGGPPQLTEEVENKGGDQ
GPPLMTDGGGGHSHDSGHGGGDPHLPTLLLGSSGSGGDDDDPHGPVQLSY
YD**
SEQ ID NO: 25: TpoR.TpoR-cyt.LMP1-cyt
atgccnwsntgggcnytnttyatggtnacnwsntgyytnytnytngcncc
ncaraayytngcncargtnwsnwsncargaygtnwsnytnytngcnwsng
aywsngarccnytnaartgyttywsnmgnacnttygargayytnacntgy
ttytgggaygargargargcngcnccnwsnggnacntaycarytnytnta
ygcntayccnmgngaraarccnmgngcntgyccnytnwsnwsncarwsna
tgccncayttyggnacnmgntaygtntgycarttyccngaycargargar
gtnmgnytnttyttyccnytncayytntgggtnaaraaygtnttyytnaa
ycaracnmgnacncarmgngtnytnttygtngaywsngtnggnytnccng
cnccnccnwsnathathaargcnatgggnggnwsncarccnggngarytn
carathwsntgggargarccngcnccngarathwsngayttyytnmgnta
ygarytnmgntayggnccnmgngayccnaaraaywsnacnggnccnacng
tnathcarytnathgcnacngaracntgytgyccngcnytncarmgnccn
caywsngcnwsngcnytngaycarwsnccntgygcncarccnacnatgcc
ntggcargayggnccnaarcaracnwsnccnwsnmgngargcnwsngcny
tnacngcngarggnggnwsntgyytnathwsnggnytncarccnggnaay
wsntaytggytncarytnmgnwsngarccngayggnathwsnytnggngg
nwsntggggnwsntggwsnytnccngtnacngtngayytnccnggngayg
cngtngcnytnggnytncartgyttyacnytngayytnaaraaygtnacn
tgycartggcarcarcargaycaygcnwsnwsncarggnttyttytayca
ywsnmgngcnmgntgytgyccnmgngaymgntayccnathtgggaraayt
gygargargargaraaracnaayccnggnytncaracnccncarttywsn
mgntgycayttyaarwsnmgnaaygaywsnathathcayathytngtnga
rgtnacnacngcnccnggnacngtncaywsntayytnggnwsnccnttyt
ggathcaycargcngtnmgnytnccnacnccnaayytncaytggmgngar
athwsnwsnggncayytngarytngartggcarcayccnwsnwsntgggc
ngcncargaracntgytaycarytnmgntayacnggngarggncaycarg
aytggaargtnytngarccnccnytnggngcnmgnggnggnacnytngar
ytnmgnccnmgnwsnmgntaymgnytncarytnmgngcnmgnytnaaygg
nccnacntaycarggnccntggwsnwsntggwsngayccnacnmgngtng
aracngcnacngaracngcntggathwsnytngtnacngcnytncayytn
gtnytnggnytnwsngcngtnytnggnytnytnytnytnmgntggcartt
yccngcncaytaymgnmgnytnmgncaygcnytntggccnwsnytnccng
ayytncaymgngtnytnggncartayytnmgngayacngcngcnytnwsn
ccnccnaargcnacngtnwsngayacntgygargargtngarccnwsnyt
nytngarathytnccnaarwsnwsngarmgnacnccnytnccnytntgyw
snwsncargcncaratggaytaymgnmgnytncarccnwsntgyytnggn
acnatgccnytnwsngtntgyccnccnatggcngarwsnggnwsntgytg
yacnacncayathgcnaaycaywsntayytnccnytnwsntaytggcarc
arccntaycayggncarmgncaywsngaygarcaycaycaygaygaywsn
ytnccncayccncarcargcnacngaygaywsnggncaygarwsngayws
naaywsnaaygarggnmgncaycayytnytngtnwsnggngcnggngayg
gnccnccnytntgywsncaraayytnggngcnccnggnggnggnccngay
aayggnccncargayccngayaayacngaygayaayggnccncargaycc
ngayaayacngaygayaayggnccncaygayccnytnccncargayccng
ayaayacngaygayaayggnccncargayccngayaayacngaygayaay
ggnccncaygayccnytnccncaywsnccnwsngaywsngcnggnaayga
yggnggnccnccncarytnacngargargtngaraayaarggnggngayc
arggnccnccnytnatgacngayggnggnggnggncaywsncaygaywsn
ggncayggnggnggngayccncayytnccnacnytnytnytnggnwsnws
nggnwsnggnggngaygaygaygayccncayggnccngtncarytnwsnt
aytaygaytrrtrr

[0191] SEQ ID NO: 12: TpoR LMP1-cyt

[0192] 714 amino acids presented in the N- to C-terminus direction, of which 1-491 (bold): TpoR extracellular domain, 492-513 (bold, underlined): TpoR TM domain, 514-714 (unformatted): LMP-1 cytoplasmic domain.

MPSWALFMVTSCLLLAPQNLAQVSSQDVSLLASDSEPLKCFSRTFEDLTC
FWDEEEAAPSGTYQLLYAYPREKPRACPLSSQSMPHFGTRYVCQFPDQEE
VRLFFPLHLWVKNVFLNQTRTQRVLFVDSVGLPAPPSIIKAMGGSQPGEL
QISWEEPAPEISDFLRYELRYGPRDPKNSTGPTVIQLIATETCCPALQRP
HSASALDQSPCAQPTMPWQDGPKQTSPSREASALTAEGGSCLISGLQPGN
SYWLQLRSEPDGISLGGSWGSWSLPVTVDLPGDAVALGLQCFTLDLKNVT
CQWQQQDHASSQGFFYHSRARCCPRDRYPIWENCEEEEKTNPGLQTPQFS
RCHFKSRNDSIIHILVEVTTAPGTVHSYLGSPFWIHQAVRLPTPNLHWRE
ISSGHLELEWQHPSSWAAQETCYQLRYTGEGHQDWKVLEPPLGARGGTLE
LRPRSRYRLQLRARLNGPTYQGPWSSWSDPTRVETATETAWISLVTALHL
VLGLSAVLGLLLLYHGQRHSDEHHHDDSLPHPQQATDDSGHESDSNSNEG
RHHLLVSGAGDGPPLCSQNLGAPGGGPDNGPQDPDNTDDNGPQDPDNTDD
NGPHDPLPQDPDNTDDNGPQDPDNTDDNGPHDPLPHSPSDSAGNDGGPPQ
LTEEVENKGGDQGPPLMTDGGGGHSHDSGHGGGDPHLPTLLLGSSGSGGD
DDDPHGPVQLSYYD**
SEQ ID NO: 26: TpoR.LMP1-cyt
atgccnwsntgggcnytnttyatggtnacnwsntgyytnytnytngcncc
ncaraayytngcncargtnwsnwsncargaygtnwsnytnytngcnwsng
aywsngarccnytnaartgyttywsnmgnacnttygargayytnacntgy
ttytgggaygargargargcngcnccnwsnggnacntaycarytnytnta
ygcntayccnmgngaraarccnmgngcntgyccnytnwsnwsncarwsna
tgccncayttyggnacnmgntaygtntgycarttyccngaycargargar
gtnmgnytnttyttyccnytncayytntgggtnaaraaygtnttyytnaa
ycaracnmgnacncarmgngtnytnttygtngaywsngtnggnytnccng
cnccnccnwsnathathaargcnatgggnggnwsncarccnggngarytn
carathwsntgggargarccngcnccngarathwsngayttyytnmgnta
ygarytnmgntayggnccnmgngayccnaaraaywsnacnggnccnacng
tnathcarytnathgcnacngaracntgytgyccngcnytncarmgnccn
caywsngcnwsngcnytngaycarwsnccntgygcncarccnacnatgcc
ntggcargayggnccnaarcaracnwsnccnwsnmgngargcnwsngcny
tnacngcngarggnggnwsntgyytnathwsnggnytncarccnggnaay
wsntaytggytncarytnmgnwsngarccngayggnathwsnytnggngg
nwsntggggnwsntggwsnytnccngtnacngtngayytnccnggngayg
cngtngcnytnggnytncartgyttyacnytngayytnaaraaygtnacn
tgycartggcarcarcargaycaygcnwsnwsncarggnttyttytayca
ywsnmgngcnmgntgytgyccnmgngaymgntayccnathtgggaraayt
gygargargargaraaracnaayccnggnytncaracnccncarttywsn
mgntgycayttyaarwsnmgnaaygaywsnathathcayathytngtnga
rgtnacnacngcnccnggnacngtncaywsntayytnggnwsnccnttyt
ggathcaycargcngtnmgnytnccnacnccnaayytncaytggmgngar
athwsnwsnggncayytngarytngartggcarcayccnwsnwsntgggc
ngcncargaracntgytaycarytnmgntayacnggngarggncaycarg
aytggaargtnytngarccnccnytnggngcnmgnggnggnacnytngar
ytnmgnccnmgnwsnmgntaymgnytncarytnmgngcnmgnytnaaygg
nccnacntaycarggnccntggwsnwsntggwsngayccnacnmgngtng
aracngcnacngaracngcntggathwsnytngtnacngcnytncayytn
gtnytnggnytnwsngcngtnytnggnytnytnytnytntaycayggnca
rmgncaywsngaygarcaycaycaygaygaywsnytnccncayccncarc
argcnacngaygaywsnggncaygarwsngaywsnaaywsnaaygarggn
mgncaycayytnytngtnwsnggngcnggngayggnccnccnytntgyws
ncaraayytnggngcnccnggnggnggnccngayaayggnccncargayc
cngayaayacngaygayaayggnccncargayccngayaayacngaygay
aayggnccncaygayccnytnccncargayccngayaayacngaygayaa
yggnccncargayccngayaayacngaygayaayggnccncaygayccny
tnccncaywsnccnwsngaywsngcnggnaaygayggnggnccnccncar
ytnacngargargtngaraayaarggnggngaycarggnccnccnytnat
gacngayggnggnggnggncaywsncaygaywsnggncayggnggnggng
ayccncayytnccnacnytnytnytnggnwsnwsnggnwsnggnggngay
gaygaygayccncayggnccngtncarytnwsntaytaygaytrrtrr

[0193] SEQ ID NO: 13: TpoRec.TpoRtm.CD137cyto

[0194] 555 amino acids presented in the N- to C-terminus direction, of which 1-491 (bold): TpoR extracellular domain, 492-513 (bold, underlined): TpoR TM domain, 514-555 (unformatted): CD137 cytoplasmic domain.

MPSWALFMVTSCLLLAPQNLAQVSSQDVSLLASDSEPLKCFSRTFEDLTC
FWDEEEAAPSGTYQLLYAYPREKPRACPLSSQSMPHFGTRYVCQFPDQEE
VRLFFPLHLWVKNVFLNQTRTQRVLFVDSVGLPAPPSIIKAMGGSQPGEL
QISWEEPAPEISDFLRYELRYGPRDPKNSTGPTVIQLIATETCCPALQRP
HSASALDQSPCAQPTMPWQDGPKQTSPSREASALTAEGGSCLISGLQPGN
SYWLQLRSEPDGISLGGSWGSWSLPVTVDLPGDAVALGLQCFTLDLKNVT
CQWQQQDHASSQGFFYHSRARCCPRDRYPIWENCEEEEKTNPGLQTPQFS
RCHFKSRNDSIIHILVEVTTAPGTVHSYLGSPFWIHQAVRLPTPNLHWRE
ISSGHLELEWQHPSSWAAQETCYQLRYTGEGHQDWKVLEPPLGARGGTLE
LRPRSRYRLQLRARLNGPTYQGPWSSWSDPTRVETATETAWISLVTALHL
VLGLSAVLGLLLLKRGRKKLLYIFKQPFMRPVQTTQEEDGCSCRFPEEEE
GGCEL**
SEQ ID NO: 27: TpoRec.TpoRtm.CD137cyto
atgccnwsntgggcnytnttyatggtnacnwsntgyytnytnytngcncc
ncaraayytngcncargtnwsnwsncargaygtnwsnytnytngcnwsng
aywsngarccnytnaartgyttywsnmgnacnttygargayytnacntgy
ttytgggaygargargargcngcnccnwsnggnacntaycarytnytnta
ygcntayccnmgngaraarccnmgngcntgyccnytnwsnwsncarwsna
tgccncayttyggnacnmgntaygtntgycarttyccngaycargargar
gtnmgnytnttyttyccnytncayytntgggtnaaraaygtnttyytnaa
ycaracnmgnacncarmgngtnytnttygtngaywsngtnggnytnccng
cnccnccnwsnathathaargcnatgggnggnwsncarccnggngarytn
carathwsntgggargarccngcnccngarathwsngayttyytnmgnta
ygarytnmgntayggnccnmgngayccnaaraaywsnacnggnccnacng
tnathcarytnathgcnacngaracntgytgyccngcnytncarmgnccn
caywsngcnwsngcnytngaycarwsnccntgygcncarccnacnatgcc
ntggcargayggnccnaarcaracnwsnccnwsnmgngargcnwsngcny
tnacngcngarggnggnwsntgyytnathwsnggnytncarccnggnaay
wsntaytggytncarytnmgnwsngarccngayggnathwsnytnggngg
nwsntggggnwsntggwsnytnccngtnacngtngayytnccnggngayg
cngtngcnytnggnytncartgyttyacnytngayytnaaraaygtnacn
tgycartggcarcarcargaycaygcnwsnwsncarggnttyttytayca
ywsnmgngcnmgntgytgyccnmgngaymgntayccnathtgggaraayt
gygargargargaraaracnaayccnggnytncaracnccncarttywsn
mgntgycayttyaarwsnmgnaaygaywsnathathcayathytngtnga
rgtnacnacngcnccnggnacngtncaywsntayytnggnwsnccnttyt
ggathcaycargcngtnmgnytnccnacnccnaayytncaytggmgngar
athwsnwsnggncayytngarytngartggcarcayccnwsnwsntgggc
ngcncargaracntgytaycarytnmgntayacnggngarggncaycarg
aytggaargtnytngarccnccnytnggngcnmgnggnggnacnytngar
ytnmgnccnmgnwsnmgntaymgnytncarytnmgngcnmgnytnaaygg
nccnacntaycarggnccntggwsnwsntggwsngayccnacnmgngtng
aracngcnacngaracngcntggathwsnytngtnacngcnytncayytn
gtnytnggnytnwsngcngtnytnggnytnytnytnytnaarmgnggnmg
naaraarytnytntayathttyaarcarccnttyatgingnccngtncar
acnacncargargargayggntgywsntgymgnttyccngargargarga
rggnggntgygarytntrrtrr

[0195] SEQ ID NO: 14: TpoRec.TpoRtm.CD28cyto

[0196] 554 amino acids presented in the N- to C-terminus direction, of which 1-491 (bold): TpoR extracellular domain, 492-513 (bold, underlined): TpoR TM domain, 514-554 (unformatted): CD28 cytoplasmic domain.

MPSWALFMVTSCLLLAPQNLAQVSSQDVSLLASDSEPLKCFSRTFEDLTC
FWDEEEAAPSGTYQLLYAYPREKPRACPLSSQSMPHFGTRYVCQFPDQEE
VRLFFPLHLWVKNVFLNQTRTQRVLFVDSVGLPAPPSIIKAMGGSQPGEL
QISWEEPAPEISDFLRYELRYGPRDPKNSTGPTVIQLIATETCCPALQRP
HSASALDQSPCAQPTMPWQDGPKQTSPSREASALTAEGGSCLISGLQPGN
SYWLQLRSEPDGISLGGSWGSWSLPVTVDLPGDAVALGLQCFTLDLKNVT
CQWQQQDHASSQGFFYHSRARCCPRDRYPIWENCEEEEKTNPGLQTPQFS
RCHFKSRNDSIIHILVEVTTAPGTVHSYLGSPFWIHQAVRLPTPNLHWRE
ISSGHLELEWQHPSSWAAQETCYQLRYTGEGHQDWKVLEPPLGARGGTLE
LRPRSRYRLQLRARLNGPTYQGPWSSWSDPTRVETATETAWISLVTALHL
VLGLSAVLGLLLLRSKRSRLLHSDYMNMTPRRPGPTRKHVQPVAPPRDFA
AVRS**
SEQ ID NO: 28: TpoRec.TpoRtm.CD28cyto
atgccnwsntgggcnytnttyatggtnacnwsntgyytnytnytngcncc
ncaraayytngcncargtnwsnwsncargaygtnwsnytnytngcnwsng
aywsngarccnytnaartgyttywsnmgnacnttygargayytnacntgy
ttytgggaygargargargcngcnccnwsnggnacntaycarytnytnta
ygcntayccnmgngaraarccnmgngcntgyccnytnwsnwsncarwsna
tgccncayttyggnacnmgntaygtntgycarttyccngaycargargar
gtnmgnytnttyttyccnytncayytntgggtnaaraaygtnttyytnaa
ycaracnmgnacncarmgngtnytnttygtngaywsngtnggnytnccng
cnccnccnwsnathathaargcnatgggnggnwsncarccnggngarytn
carathwsntgggargarccngcnccngarathwsngayttyytnmgnta
ygarytnmgntayggnccnmgngayccnaaraaywsnacnggnccnacng
tnathcarytnathgcnacngaracntgytgyccngcnytncarmgnccn
caywsngcnwsngcnytngaycarwsnccntgygcncarccnacnatgcc
ntggcargayggnccnaarcaracnwsnccnwsnmgngargcnwsngcny
tnacngcngarggnggnwsntgyytnathwsnggnytncarccnggnaay
wsntaytggytncarytnmgnwsngarccngayggnathwsnytnggngg
nwsntggggnwsntggwsnytnccngtnacngtngayytnccnggngayg
cngtngcnytnggnytncartgyttyacnytngayytnaaraaygtnacn
tgycartggcarcarcargaycaygcnwsnwsncarggnttyttytayca
ywsnmgngcnmgntgytgyccnmgngaymgntayccnathtgggaraayt
gygargargargaraaracnaayccnggnytncaracnccncarttywsn
mgntgycayttyaarwsnmgnaaygaywsnathathcayathytngtnga
rgtnacnacngcnccnggnacngtncaywsntayytnggnwsnccnttyt
ggathcaycargcngtnmgnytnccnacnccnaayytncaytggmgngar
athwsnwsnggncayytngarytngartggcarcayccnwsnwsntgggc
ngcncargaracntgytaycarytnmgntayacnggngarggncaycarg
aytggaargtnytngarccnccnytnggngcnmgnggnggnacnytngar
ytnmgnccnmgnwsnmgntaymgnytncarytnmgngcnmgnytnaaygg
nccnacntaycarggnccntggwsnwsntggwsngayccnacnmgngtng
aracngcnacngaracngcntggathwsnytngtnacngcnytncayytn
gtnytnggnytnwsngcngtnytnggnytnytnytnytnmgnwsnaarmg
nwsnmgnytnytncaywsngaytayatgaayatgacnccnmgnmgnccng
gnccnacnmgnaarcaytaycarccntaygcnccnccnmgngayttygcn
gcntaymgnwsntrrtrr

[0197] The invention is further described by the following numbered paragraphs:

1. A T or NK cell comprising a chimeric recombinant growth factor receptor (CrGFR) comprising:
(i) an extracellular (EC) domain;
(ii) a thrombopoietin transmembrane (TM) domain; and
(iii) a first intracellular (IC) domain; and, optionally,
(iv) a second intracellular domain.
2. The T or NK cell according to paragraph 1 wherein binding of a ligand to the CrGFR induces proliferation of the T or NK cell.
3. The T or NK cell according to paragraph 2 wherein the ligand is human thrombopoietin, a thrombopoietin receptor agonist, or a tumour associated antigen.
4. The T or NK cell according to paragraph 3 wherein the thrombopoietin receptor agonist binds to the TM domain.
5. The T or NK cell according to paragraph 3 or paragraph 4 wherein the thrombopoietin receptor agonist is selected from Eltrombopag and Romiplostim.
6. The T or NK cell according to the preceding paragraphs wherein the EC domain comprises the human c-mpl (thrombopoietin) EC domain.
7. The T or NK cell according to paragraphs 1 to 5 wherein the EC domain comprises one or more of i) a truncated EC domain, ii) a truncated c-mpl EC domain, iii) a domain that binds to a tumour associated antigen, iv) an antibody or antibody fragment that binds to a tumour associated antigen; and v) a selection marker.
8. The T or NK cell according to the preceding paragraphs wherein the first IC domain is selected from human growth hormone receptor, human prolactin receptor, human thrombopoietin receptor (c-mpl), G-CSF receptor, GM-CSF receptor, LMP, IL2, CD28 or CD137.
9. The T or NK cell according to the preceding paragraphs wherein the first IC domain comprises the IC domain from human thrombopoietin receptor (c-mpl), or a truncated IC domain from human thrombopoietin receptor (c-mpl).
10. The T or NK cell according to the preceding paragraphs wherein the second IC domain is from human growth hormone receptor, human prolactin receptor, human thrombopoietin receptor (c-mpl), G-CSF receptor or GM-CSF receptor, a costimulatory receptor, a cytokine receptor or a cosignalling receptor.
11. The T or NK cell according to paragraph 8 or paragraph 9 wherein the second IC domain is selected from human thrombopoietin receptor (c-mpl), or a truncated IC domain from human thrombopoietin receptor (c-mpl) preferably TpoR 460, CD40, IL2rβ, IL2Rγ, ITAM1 or LMP1.
12. The T or NK cell according to the preceding paragraphs wherein the CrGFR comprises the TM sequence shown in SEQ ID NO: 1, or a variant thereof having at least 80% sequence identity, which binds human thrombopoietin or a thrombopoietin receptor agonist.
13. The T or NK cell comprising a chimeric recombinant growth factor receptor (CrGFR), wherein the CrGFR comprises the sequence shown as SEQ ID NOS: 3, 4, 5, 6, 7, 8, 9, 10, 11, 12, 13, or 14, or a variant thereof having at least 80%, 85%, 90% 95% 97% or 99% sequence identity which binds human thrombopoietin or a thrombopoietin receptor agonist.
14. A T or NK cell according to paragraph 13 wherein binding by thrombopoietin, or a human thrombopoietin receptor agonist induces cell proliferation and/or survival.
15. The T cell or NK cell according to any preceding paragraph which binds to Eltrombopag.
16. The T cell or NK cell according to any preceding paragraph wherein the T cell is selected from a Tumour Infiltrating Lymphocyte (TIL) a T Regulatory Cell (Treg) or a primary T cell.
17. The T cell or NK cell according to any preceding paragraph further comprising a recombinant T-cell receptor (TCR) and/or Chimeric Antigen Receptor (CAR).
18. A chimeric recombinant growth factor receptor (CrGFR) as defined in any preceding paragraph.
19. A cell comprising the chimeric recombinant growth factor receptor (CrGFR) according to paragraph 18.
20. A nucleic acid sequence encoding the CrGFR as defined in any preceding paragraph.
21. A nucleic acid sequence according to paragraph 20 which comprises the sequence shown as SEQ ID NOS: 15, 16, 17, 18, 19, 20, 21, 22, 23, 24, 25, 26, 27 or 28.
22. A vector which comprises a nucleic acid sequence according to paragraph 20 or 21.
23. A method for making a T cell or NK cell according to any of paragraphs 1-17, which comprises the step of introducing a nucleic acid according to paragraph 20 or 21, or vector according to paragraph 22, into a T cell or NK cell.
24. A pharmaceutical composition which comprises a vector according to paragraph 22 or a T or NK cell according to paragraphs 1-17, together with a pharmaceutically acceptable carrier, diluent or excipient.
25. A method of in-vivo cell expansion comprising administering the cells of paragraphs 1-17, or pharmaceutical composition of paragraph 24 to a subject.
26. A method of in-vivo cell expansion according to paragraph 25 comprising administering thrombopoietin, or a thrombopoietin receptor agonist such as Eltrombopag or Romiplostim, to a subject.
27. A T or NK cell according to any of paragraphs 1-17, or vector according to paragraph 22, for use in adoptive cell therapy.
28. A T or NK cell according to any of paragraphs 1-17, or vector according to paragraph 22, for use in a method of treating cancer.
29. A method for treating cancer which comprises the step of administering the T cell or NK cell according to any of paragraphs 1-17 to a subject.
30. The use of a vector according to paragraph 22 or the T or NK cell according to any of paragraphs 1-17 in the manufacture of a medicament for treating cancer.
31. Eltrombopag for use in the in-vitro or in-vivo expansion of T or NK cells according to any of paragraphs 1-17.
32. A composition comprising a T or NK cell according to paragraphs 1 to 17 for use in combination with thrombopoietin or a thrombopoietin receptor agonist in the treatment of a cancer.

[0198] Having thus described in detail preferred embodiments of the present invention, it is to be understood that the invention defined by the above paragraphs is not to be limited to particular details set forth in the above description as many apparent variations thereof are possible without departing from the spirit or scope of the present invention.

The application's sequence listing, which the Patent Office published only in electronic form, follows.

SEQUENCE LISTING (28 sequences)

SEQ ID NO: 1 - protein, 635 aa, Homo sapiens
  MISC_FEATURE (1)..(491): TpoR Extracellular Domain
  MISC_FEATURE (492)..(513): TpoR Transmembrane Domain
  MISC_FEATURE (514)..(635): TpoR Cytoplasmic Domain
MPSWALFMVTSCLLLAPQNLAQVSSQDVSLLASDSEPLKCFSRTFEDLTCFWDEEEAAPSGTYQLLYAYPREKPRACPLSSQSMPHFGTRYVCQFPDQEEVRLFFPLHLWVKNVFLNQTRTQRVLFVDSVGLPAPPSIIKAMGGSQPGELQISWEEPAPEISDFLRYELRYGPRDPKNSTGPTVIQLIATETCCPALQRPHSASALDQSPCAQPTMPWQDGPKQTSPSREASALTAEGGSCLISGLQPGNSYWLQLRSEPDGISLGGSWGSWSLPVTVDLPGDAVALGLQCFTLDLKNVTCQWQQQDHASSQGFFYHSRARCCPRDRYPIWENCEEEEKTNPGLQTPQFSRCHFKSRNDSIIHILVEVTTAPGTVHSYLGSPFWIHQAVRLPTPNLHWREISSGHLELEWQHPSSWAAQETCYQLRYTGEGHQDWKVLEPPLGARGGTLELRPRSRYRLQLRARLNGPTYQGPWSSWSDPTRVETATETAWISLVTALHLVLGLSAVLGLLLLRWQFPAHYRRLRHALWPSLPDLHRVLGQYLRDTAALSPPKATVSDTCEEVEPSLLEILPKSSERTPLPLCSSQAQMDYRRLQPSCLGTMPLSVCPPMAESGSCCTTHIANHSYLPLSYWQQP

SEQ ID NO: 2 - protein, 580 aa, Artificial Sequence
  TpoR.delta60
  MISC_FEATURE (1)..(491): TpoR Extracellular Domain
  MISC_FEATURE (492)..(513): TpoR Transmembrane Domain
  MISC_FEATURE (514)..(580): TpoR Cytoplasmic Domain with C-terminal Truncation
MPSWALFMVTSCLLLAPQNLAQVSSQDVSLLASDSEPLKCFSRTFEDLTCFWDEEEAAPSGTYQLLYAYPREKPRACPLSSQSMPHFGTRYVCQFPDQEEVRLFFPLHLWVKNVFLNQTRTQRVLFVDSVGLPAPPSIIKAMGGSQPGELQISWEEPAPEISDFLRYELRYGPRDPKNSTGPTVIQLIATETCCPALQRPHSASALDQSPCAQPTMPWQDGPKQTSPSREASALTAEGGSCLISGLQPGNSYWLQLRSEPDGISLGGSWGSWSLPVTVDLPGDAVALGLQCFTLDLKNVTCQWQQQDHASSQGFFYHSRARCCPRDRYPIWENCEEEEKTNPGLQTPQFSRCHFKSRNDSIIHILVEVTTAPGTVHSYLGSPFWIHQAVRLPTPNLHWREISSGHLELEWQHPSSWAAQETCYQLRYTGEGHQDWKVLEPPLGARGGTLELRPRSRYRLQLRARLNGPTYQGPWSSWSDPTRVETATETAWISLVTALHLVLGLSAVLGLLLLRWQFPAHYRRLRHALWPSLPDLHRVLGQYLRDTAALSPPKATVSDTCEEVEPSLLEILPKSSERTPL

SEQ ID NO: 3 - protein, 626 aa, Artificial Sequence
  TpoR.TpoR-cyt.IL2r-beta-cyt
  MISC_FEATURE (1)..(491): TpoR Extracellular Domain
  MISC_FEATURE (492)..(513): TpoR Transmembrane Domain
  MISC_FEATURE (514)..(538): TpoR Cytoplasmic Domain with C-terminal Truncation
  MISC_FEATURE (539)..(626): IL2r-beta Cytoplasmic Domain
MPSWALFMVTSCLLLAPQNLAQVSSQDVSLLASDSEPLKCFSRTFEDLTCFWDEEEAAPSGTYQLLYAYPREKPRACPLSSQSMPHFGTRYVCQFPDQEEVRLFFPLHLWVKNVFLNQTRTQRVLFVDSVGLPAPPSIIKAMGGSQPGELQISWEEPAPEISDFLRYELRYGPRDPKNSTGPTVIQLIATETCCPALQRPHSASALDQSPCAQPTMPWQDGPKQTSPSREASALTAEGGSCLISGLQPGNSYWLQLRSEPDGISLGGSWGSWSLPVTVDLPGDAVALGLQCFTLDLKNVTCQWQQQDHASSQGFFYHSRARCCPRDRYPIWENCEEEEKTNPGLQTPQFSRCHFKSRNDSIIHILVEVTTAPGTVHSYLGSPFWIHQAVRLPTPNLHWREISSGHLELEWQHPSSWAAQETCYQLRYTGEGHQDWKVLEPPLGARGGTLELRPRSRYRLQLRARLNGPTYQGPWSSWSDPTRVETATETAWISLVTALHLVLGLSAVLGLLLLRWQFPAHYRRLRHALWPSLPDLHRVPRDWDPQPLGPPTPGVPDLVDFQPPPELVLREAGEEVPDAGPREGVSFPWSRPPGQGEFRALNARLPLNTDAYLSLQELQGQDPTHLV

SEQ ID NO: 4 - protein, 808 aa, Artificial Sequence
  TpoR.IL2rB-cyt.TpoR-cyt
  MISC_FEATURE (1)..(491): TpoR Extracellular Domain
  MISC_FEATURE (492)..(513): TpoR Transmembrane Domain
  MISC_FEATURE (514)..(709): IL2rB Cytoplasmic Domain
  MISC_FEATURE (710)..(808): TpoR Cytoplasmic Domain with N-terminal Truncation
MPSWALFMVTSCLLLAPQNLAQVSSQDVSLLASDSEPLKCFSRTFEDLTCFWDEEEAAPSGTYQLLYAYPREKPRACPLSSQSMPHFGTRYVCQFPDQEEVRLFFPLHLWVKNVFLNQTRTQRVLFVDSVGLPAPPSIIKAMGGSQPGELQISWEEPAPEISDFLRYELRYGPRDPKNSTGPTVIQLIATETCCPALQRPHSASALDQSPCAQPTMPWQDGPKQTSPSREASALTAEGGSCLISGLQPGNSYWLQLRSEPDGISLGGSWGSWSLPVTVDLPGDAVALGLQCFTLDLKNVTCQWQQQDHASSQGFFYHSRARCCPRDRYPIWENCEEEEKTNPGLQTPQFSRCHFKSRNDSIIHILVEVTTAPGTVHSYLGSPFWIHQAVRLPTPNLHWREISSGHLELEWQHPSSWAAQETCYQLRYTGEGHQDWKVLEPPLGARGGTLELRPRSRYRLQLRARLNGPTYQGPWSSWSDPTRVETATETAWISLVTALHLVLGLSAVLGLLLLNCRNTGPWLKKVLKCNTPDPSKFFSQLSSEHGGDVQKWLSSPFPSSSFSPGGLAPEISPLEVLERDKVTQLLLQQDKVPEPASLSSNHSLTSCFTNQGYFFFHLPDALEIEACQVYFTYDPYSEEDPDEGVAGAPTGSSPQPLQPLSGEDDAYCTFPSRDDLLLFSPSLLGGPSPPSTAPGGSGAGEERMPPSLQERVLGQYLRDTAALSPPKATVSDTCEEVEPSLLEILPKSSERTPLPLCSSQAQMDYRRLQPSCLGTMPLSVCPPMAESGSCCTTHIANHSYLPLSYWQQP

SEQ ID NO: 5 - protein, 710 aa, Artificial Sequence
  TpoR.SLAM
  MISC_FEATURE (1)..(491): TpoR Extraceullular Domain
  MISC_FEATURE (492)..(513): TpoR Transmembrane Domain
  MISC_FEATURE (514)..(635): TpoR Cytoplasmic Domain
  MISC_FEATURE (636)..(710): SLAM Cytoplasmic Domain
MPSWALFMVTSCLLLAPQNLAQVSSQDVSLLASDSEPLKCFSRTFEDLTCFWDEEEAAPSGTYQLLYAYPREKPRACPLSSQSMPHFGTRYVCQFPDQEEVRLFFPLHLWVKNVFLNQTRTQRVLFVDSVGLPAPPSIIKAMGGSQPGELQISWEEPAPEISDFLRYELRYGPRDPKNSTGPTVIQLIATETCCPALQRPHSASALDQSPCAQPTMPWQDGPKQTSPSREASALTAEGGSCLISGLQPGNSYWLQLRSEPDGISLGGSWGSWSLPVTVDLPGDAVALGLQCFTLDLKNVTCQWQQQDHASSQGFFYHSRARCCPRDRYPIWENCEEEEKTNPGLQTPQFSRCHFKSRNDSIIHILVEVTTAPGTVHSYLGSPFWIHQAVRLPTPNLHWREISSGHLELEWQHPSSWAAQETCYQLRYTGEGHQDWKVLEPPLGARGGTLELRPRSRYRLQLRARLNGPTYQGPWSSWSDPTRVETATETAWISLVTALHLVLGLSAVLGLLLLRWQFPAHYRRLRHALWPSLPDLHRVLGQYLRDTAALSPPKATVSDTCEEVEPSLLEILPKSSERTPLPLCSSQAQMDYRRLQPSCLGTMPLSVCPPMAESGSCCTTHIANHSYLPLSYWQQPRRRGKTNHYQTTVEKKSLTIYAQVQKPGPLQKKLDSFPAQDPCTTIYVAATEPVPESVQETNSITVYASVTLPES

SEQ ID NO: 6 - protein, 721 aa, Artificial Sequence
  TpoR.IL2rgamma
  MISC_FEATURE (1)..(491): TpoR Extracellular Domain
  MISC_FEATURE (492)..(513): TpoR Transmembrane Domain
  MISC_FEATURE (514)..(635): TpoR Cytoplasmic Domain
  MISC_FEATURE (636)..(721): IL2r-gamma Cytoplasmic Domain
MPSWALFMVTSCLLLAPQNLAQVSSQDVSLLASDSEPLKCFSRTFEDLTCFWDEEEAAPSGTYQLLYAYPREKPRACPLSSQSMPHFGTRYVCQFPDQEEVRLFFPLHLWVKNVFLNQTRTQRVLFVDSVGLPAPPSIIKAMGGSQPGELQISWEEPAPEISDFLRYELRYGPRDPKNSTGPTVIQLIATETCCPALQRPHSASALDQSPCAQPTMPWQDGPKQTSPSREASALTAEGGSCLISGLQPGNSYWLQLRSEPDGISLGGSWGSWSLPVTVDLPGDAVALGLQCFTLDLKNVTCQWQQQDHASSQGFFYHSRARCCPRDRYPIWENCEEEEKTNPGLQTPQFSRCHFKSRNDSIIHILVEVTTAPGTVHSYLGSPFWIHQAVRLPTPNLHWREISSGHLELEWQHPSSWAAQETCYQLRYTGEGHQDWKVLEPPLGARGGTLELRPRSRYRLQLRARLNGPTYQGPWSSWSDPTRVETATETAWISLVTALHLVLGLSAVLGLLLLRWQFPAHYRRLRHALWPSLPDLHRVLGQYLRDTAALSPPKATVSDTCEEVEPSLLEILPKSSERTPLPLCSSQAQMDYRRLQPSCLGTMPLSVCPPMAESGSCCTTHIANHSYLPLSYWQQPERTMPRIPTLKNLEDLVTEYHGNFSAWSGVSKGLAESLQPDYSERLCLVSEIPPKGGALGEGPGASPCNQHSPYWAPPCYTLKPET

SEQ ID NO: 7 - protein, 817 aa, Artificial Sequence
  TpoR-TLR1
  MISC_FEATURE (1)..(491): TpoR Extracellular Domain
  MISC_FEATURE (492)..(513): TpoR Transmembrane Domain
  MISC_FEATURE (514)..(635): TpoR Cytoplasmic Domain
  MISC_FEATURE (636)..(817): TLR1 Cytoplasmic Domain
MPSWALFMVTSCLLLAPQNLAQVSSQDVSLLASDSEPLKCFSRTFEDLTCFWDEEEAAPSGTYQLLYAYPREKPRACPLSSQSMPHFGTRYVCQFPDQEEVRLFFPLHLWVKNVFLNQTRTQRVLFVDSVGLPAPPSIIKAMGGSQPGELQISWEEPAPEISDFLRYELRYGPRDPKNSTGPTVIQLIATETCCPALQRPHSASALDQSPCAQPTMPWQDGPKQTSPSREASALTAEGGSCLISGLQPGNSYWLQLRSEPDGISLGGSWGSWSLPVTVDLPGDAVALGLQCFTLDLKNVTCQWQQQDHASSQGFFYHSRARCCPRDRYPIWENCEEEEKTNPGLQTPQFSRCHFKSRNDSIIHILVEVTTAPGTVHSYLGSPFWIHQAVRLPTPNLHWREISSGHLELEWQHPSSWAAQETCYQLRYTGEGHQDWKVLEPPLGARGGTLELRPRSRYRLQLRARLNGPTYQGPWSSWSDPTRVETATETAWISLVTALHLVLGLSAVLGLLLLRWQFPAHYRRLRHALWPSLPDLHRVLGQYLRDTAALSPPKATVSDTCEEVEPSLLEILPKSSERTPLPLCSSQAQMDYRRLQPSCLGTMPLSVCPPMAESGSCCTTHIANHSYLPLSYWQQPDLPWYLRMVCQWTQTRRRARNIPLEELQRNLQFHAFISYSGHDSFWVKNELLPNLEKEGMQICLHERNFVPGKSIVENIITCIEKSYKSIFVLSPNFVQSEWCHYELYFAHHNLFHEGSNSLILILLEPIPQYSIPSSYHKLKSLMARRTYLEWPKEKSKRGLFWANLRAAINIKLTEQAKK

SEQ ID NO: 8 - protein, 750 aa, Artificial Sequence
  TpoR-TIAF1
  MISC_FEATURE (1)..(491): TpoR Extracellular Domain
  MISC_FEATURE (492)..(513): TpoR Transmembrane Domain
  MISC_FEATURE (514)..(635): TpoR Cytoplasmic Domain
  MISC_FEATURE (636)..(750): TIAF1 Cytoplasmic Domain
MPSWALFMVTSCLLLAPQNLAQVSSQDVSLLASDSEPLKCFSRTFEDLTCFWDEEEAAPSGTYQLLYAYPREKPRACPLSSQSMPHFGTRYVCQFPDQEEVRLFFPLHLWVKNVFLNQTRTQRVLFVDSVGLPAPPSIIKAMGGSQPGELQISWEEPAPEISDFLRYELRYGPRDPKNSTGPTVIQLIATETCCPALQRPHSASALDQSPCAQPTMPWQDGPKQTSPSREASALTAEGGSCLISGLQPGNSYWLQLRSEPDGISLGGSWGSWSLPVTVDLPGDAVALGLQCFTLDLKNVTCQWQQQDHASSQGFFYHSRARCCPRDRYPIWENCEEEEKTNPGLQTPQFSRCHFKSRNDSIIHILVEVTTAPGTVHSYLGSPFWIHQAVRLPTPNLHWREISSGHLELEWQHPSSWAAQETCYQLRYTGEGHQDWKVLEPPLGARGGTLELRPRSRYRLQLRARLNGPTYQGPWSSWSDPTRVETATETAWISLVTALHLVLGLSAVLGLLLLRWQFPAHYRRLRHALWPSLPDLHRVLGQYLRDTAALSPPKATVSDTCEEVEPSLLEILPKSSERTPLPLCSSQAQMDYRRLQPSCLGTMPLSVCPPMAESGSCCTTHIANHSYLPLSYWQQPMSSPSSPFREQSFLCAAGDAGEESRVQVLKNEVRRGSPVLLGWVEQAYADKCVCGPSAPPAPTPPSLSQRVMCNDLFKVNPFQLQQFRADPSTASLLLCPGGLDHKLNLRGKAWG

SEQ ID NO: 9 - protein, 697 aa, Artificial Sequence
  TpoR-CD40
  MISC_FEATURE (1)..(491): TpoR Extracellular Domain
  MISC_FEATURE (492)..(513): TpoR Transmembrane Domain
  MISC_FEATURE (514)..(635): TpoR Cytoplasmic Domain
  MISC_FEATURE (636)..(697): CD40 Cytoplasmic Domain
MPSWALFMVTSCLLLAPQNLAQVSSQDVSLLASDSEPLKCFSRTFEDLTCFWDEEEAAPSGTYQLLYAYPREKPRACPLSSQSMPHFGTRYVCQFPDQEEVRLFFPLHLWVKNVFLNQTRTQRVLFVDSVGLPAPPSIIKAMGGSQPGELQISWEEPAPEISDFLRYELRYGPRDPKNSTGPTVIQLIATETCCPALQRPHSASALDQSPCAQPTMPWQDGPKQTSPSREASALTAEGGSCLISGLQPGNSYWLQLRSEPDGISLGGSWGSWSLPVTVDLPGDAVALGLQCFTLDLKNVTCQWQQQDHASSQGFFYHSRARCCPRDRYPIWENCEEEEKTNPGLQTPQFSRCHFKSRNDSIIHILVEVTTAPGTVHSYLGSPFWIHQAVRLPTPNLHWREISSGHLELEWQHPSSWAAQETCYQLRYTGEGHQDWKVLEPPLGARGGTLELRPRSRYRLQLRARLNGPTYQGPWSSWSDPTRVETATETAWISLVTALHLVLGLSAVLGLLLLRWQFPAHYRRLRHALWPSLPDLHRVLGQYLRDTAALSPPKATVSDTCEEVEPSLLEILPKSSERTPLPLCSSQAQMDYRRLQPSCLGTMPLSVCPPMAESGSCCTTHIANHSYLPLSYWQQPKKVAKKPTNKAPHPKQEPQEINFPDDLPGSNTAAPVQETLHGCQPVTQEDGKESRISVQERQ

SEQ ID NO: 10 - protein, 676 aa, Artificial Sequence
  TpoR-ITAM1
  MISC_FEATURE (1)..(491): TpoR Extracellular Domain
  MISC_FEATURE (492)..(513): TpoR Transmembrane Domain
  MISC_FEATURE (514)..(635): TpoR Cytoplasmic Domain
  MISC_FEATURE (636)..(676): ITAM1 Cytoplasmic Domain
MPSWALFMVTSCLLLAPQNLAQVSSQDVSLLASDSEPLKCFSRTFEDLTCFWDEEEAAPSGTYQLLYAYPREKPRACPLSSQSMPHFGTRYVCQFPDQEEVRLFFPLHLWVKNVFLNQTRTQRVLFVDSVGLPAPPSIIKAMGGSQPGELQISWEEPAPEISDFLRYELRYGPRDPKNSTGPTVIQLIATETCCPALQRPHSASALDQSPCAQPTMPWQDGPKQTSPSREASALTAEGGSCLISGLQPGNSYWLQLRSEPDGISLGGSWGSWSLPVTVDLPGDAVALGLQCFTLDLKNVTCQWQQQDHASSQGFFYHSRARCCPRDRYPIWENCEEEEKTNPGLQTPQFSRCHFKSRNDSIIHILVEVTTAPGTVHSYLGSPFWIHQAVRLPTPNLHWREISSGHLELEWQHPSSWAAQETCYQLRYTGEGHQDWKVLEPPLGARGGTLELRPRSRYRLQLRARLNGPTYQGPWSSWSDPTRVETATETAWISLVTALHLVLGLSAVLGLLLLRWQFPAHYRRLRHALWPSLPDLHRVLGQYLRDTAALSPPKATVSDTCEEVEPSLLEILPKSSERTPLPLCSSQAQMDYRRLQPSCLGTMPLSVCPPMAESGSCCTTHIANHSYLPLSYWQQPRVKFSRSADAPAYQQGQNQLYNELNLGRREEYDVLDKRRGR

SEQ ID NO: 11 - protein, 836 aa, Artificial Sequence
  TpoR.TpoR-cyt.LMP1-cyt
  MISC_FEATURE (1)..(491): TpoR Extracellular Domain
  MISC_FEATURE (492)..(513): TpoR Transmembrane Domain
  MISC_FEATURE (514)..(635): TpoR Cytoplasmic Domain
  MISC_FEATURE (636)..(836): LMP-1 Cytoplasmic Domain
MPSWALFMVTSCLLLAPQNLAQVSSQDVSLLASDSEPLKCFSRTFEDLTCFWDEEEAAPSGTYQLLYAYPREKPRACPLSSQSMPHFGTRYVCQFPDQEEVRLFFPLHLWVKNVFLNQTRTQRVLFVDSVGLPAPPSIIKAMGGSQPGELQISWEEPAPEISDFLRYELRYGPRDPKNSTGPTVIQLIATETCCPALQRPHSASALDQSPCAQPTMPWQDGPKQTSPSREASALTAEGGSCLISGLQPGNSYWLQLRSEPDGISLGGSWGSWSLPVTVDLPGDAVALGLQCFTLDLKNVTCQWQQQDHASSQGFFYHSRARCCPRDRYPIWENCEEEEKTNPGLQTPQFSRCHFKSRNDSIIHILVEVTTAPGTVHSYLGSPFWIHQAVRLPTPNLHWREISSGHLELEWQHPSSWAAQETCYQLRYTGEGHQDWKVLEPPLGARGGTLELRPRSRYRLQLRARLNGPTYQGPWSSWSDPTRVETATETAWISLVTALHLVLGLSAVLGLLLLRWQFPAHYRRLRHALWPSLPDLHRVLGQYLRDTAALSPPKATVSDTCEEVEPSLLEILPKSSERTPLPLCSSQAQMDYRRLQPSCLGTMPLSVCPPMAESGSCCTTHIANHSYLPLSYWQQPYHGQRHSDEHHHDDSLPHPQQATDDSGHESDSNSNEGRHHLLVSGAGDGPPLCSQNLGAPGGGPDNGPQDPDNTDDNGPQDPDNTDDNGPHDPLPQDPDNTDDNGPQDPDNTDDNGPHDPLPHSPSDSAGNDGGPPQLTEEVENKGGDQGPPLMTDGGGGHSHDSGHGGGDPHLPTLLLGSSGSGGDDDDPHGPVQLSYYD

SEQ ID NO: 12 - protein, 714 aa, Artificial Sequence
  TpoR.LMP1-cyt
  MISC_FEATURE (1)..(491): TpoR Extracellullar Domain
  MISC_FEATURE (492)..(513): TpoR Transmembrane Domain
  MISC_FEATURE (514)..(714): LMP-1 Cytoplasmic Domain
MPSWALFMVTSCLLLAPQNLAQVSSQDVSLLASDSEPLKCFSRTFEDLTCFWDEEEAAPSGTYQLLYAYPREKPRACPLSSQSMPHFGTRYVCQFPDQEEVRLFFPLHLWVKNVFLNQTRTQRVLFVDSVGLPAPPSIIKAMGGSQPGELQISWEEPAPEISDFLRYELRYGPRDPKNSTGPTVIQLIATETCCPALQRPHSASALDQSPCAQPTMPWQDGPKQTSPSREASALTAEGGSCLISGLQPGNSYWLQLRSEPDGISLGGSWGSWSLPVTVDLPGDAVALGLQCFTLDLKNVTCQWQQQDHASSQGFFYHSRARCCPRDRYPIWENCEEEEKTNPGLQTPQFSRCHFKSRNDSIIHILVEVTTAPGTVHSYLGSPFWIHQAVRLPTPNLHWREISSGHLELEWQHPSSWAAQETCYQLRYTGEGHQDWKVLEPPLGARGGTLELRPRSRYRLQLRARLNGPTYQGPWSSWSDPTRVETATETAWISLVTALHLVLGLSAVLGLLLLYHGQRHSDEHHHDDSLPHPQQATDDSGHESDSNSNEGRHHLLVSGAGDGPPLCSQNLGAPGGGPDNGPQDPDNTDDNGPQDPDNTDDNGPHDPLPQDPDNTDDNGPQDPDNTDDNGPHDPLPHSPSDSAGNDGGPPQLTEEVENKGGDQGPPLMTDGGGGHSHDSGHGGGDPHLPTLLLGSSGSGGDDDDPHGPVQLSYYD

SEQ ID NO: 13 - protein, 555 aa, Artificial Sequence
  TpoRec.TpoRtm.CD137cyto
  MISC_FEATURE (1)..(491): TpoR Extracellular Domain
  MISC_FEATURE (492)..(513): TpoR Transmembrane Domain
  MISC_FEATURE (514)..(555): CD137 Cytoplasmic Domain
MPSWALFMVTSCLLLAPQNLAQVSSQDVSLLASDSEPLKCFSRTFEDLTCFWDEEEAAPSGTYQLLYAYPREKPRACPLSSQSMPHFGTRYVCQFPDQEEVRLFFPLHLWVKNVFLNQTRTQRVLFVDSVGLPAPPSIIKAMGGSQPGELQISWEEPAPEISDFLRYELRYGPRDPKNSTGPTVIQLIATETCCPALQRPHSASALDQSPCAQPTMPWQDGPKQTSPSREASALTAEGGSCLISGLQPGNSYWLQLRSEPDGISLGGSWGSWSLPVTVDLPGDAVALGLQCFTLDLKNVTCQWQQQDHASSQGFFYHSRARCCPRDRYPIWENCEEEEKTNPGLQTPQFSRCHFKSRNDSIIHILVEVTTAPGTVHSYLGSPFWIHQAVRLPTPNLHWREISSGHLELEWQHPSSWAAQETCYQLRYTGEGHQDWKVLEPPLGARGGTLELRPRSRYRLQLRARLNGPTYQGPWSSWSDPTRVETATETAWISLVTALHLVLGLSAVLGLLLLKRGRKKLLYIFKQPFMRPVQTTQEEDGCSCRFPEEEEGGCEL

SEQ ID NO: 14 - protein, 554 aa, Artificial Sequence
  TpoRec.TpoRtm.CD28cyto
  MISC_FEATURE (1)..(491): TpoR Extracellular Domain
  MISC_FEATURE (492)..(513): TpoR Transmembrane Domain
  MISC_FEATURE (514)..(554): CD28 Cytoplasmic Domain
MPSWALFMVTSCLLLAPQNLAQVSSQDVSLLASDSEPLKCFSRTFEDLTCFWDEEEAAPSGTYQLLYAYPREKPRACPLSSQSMPHFGTRYVCQFPDQEEVRLFFPLHLWVKNVFLNQTRTQRVLFVDSVGLPAPPSIIKAMGGSQPGELQISWEEPAPEISDFLRYELRYGPRDPKNSTGPTVIQLIATETCCPALQRPHSASALDQSPCAQPTMPWQDGPKQTSPSREASALTAEGGSCLISGLQPGNSYWLQLRSEPDGISLGGSWGSWSLPVTVDLPGDAVALGLQCFTLDLKNVTCQWQQQDHASSQGFFYHSRARCCPRDRYPIWENCEEEEKTNPGLQTPQFSRCHFKSRNDSIIHILVEVTTAPGTVHSYLGSPFWIHQAVRLPTPNLHWREISSGHLELEWQHPSSWAAQETCYQLRYTGEGHQDWKVLEPPLGARGGTLELRPRSRYRLQLRARLNGPTYQGPWSSWSDPTRVETATETAWISLVTALHLVLGLSAVLGLLLLRSKRSRLLHSDYMNMTPRRPGPTRKHYQPYAPPRDFAAYRS

SEQ ID NO: 15 - DNA, 1911 bp, Homo sapiens
  misc_feature (6)..(6): n is a, c, g, or t
  misc_feature (9)..(9): n is a, c, g, or t
  misc_feature (15)..(15): n is a, c, g, or t
  misc_feature (18)..(18): n is a, c, g, or t
  misc_feature (27)..(27): n is a, c, g, or t
  misc_feature (30)..(30): n is a, c, g, or t
  misc_feature (33)..(33): n is a, c, g, or t
  misc_feature (39)..(39): n is a, c, g, or t
  misc_feature (42)..(42): n is a, c, g, or t
  misc_feature (45)..(45): n is a, c, g, or t
  misc_feature (48)..(48): n is a, c, g, or t
  misc_feature (51)..(51): n is a, c, g, or t
  misc_feature (60)..(60): n is a, c, g, or t
  misc_feature (63)..(63): n is a, c, g, or t
  misc_feature (69)..(69): n is a, c, g, or t
  misc_feature (72)..(72): n is a, c, g, or t
  misc_feature (75)..(75): n is a, c, g, or t
  misc_feature (84)..(84): n is a, c, g, or t
  misc_feature (87)..(87): n is a, c, g, or t
  misc_feature (90)..(90): n is a, c, g, or t
  misc_feature (93)..(93): n is a, c, g, or t
  misc_feature (96)..(96): n is a, c, g, or t
  misc_feature (99)..(99): n is a, c, g, or t
  misc_feature (105)..(105): n is a, c, g, or t
  misc_feature (111)..(111): n is a, c, g, or t
  misc_feature (114)..(114): n is a, c, g, or t
  misc_feature (126)..(126): n is a, c, g, or t
  misc_feature (129)..(129): n is a, c, g, or t
  misc_feature (132)..(132): n is a, c, g, or t
  misc_feature (144)..(144): n is a, c, g, or t
  misc_feature (147)..(147): n is a, c, g, or t
  misc_feature (171)..(171): n is a, c, g, or t
  misc_feature (174)..(174): n is a, c, g, or t
  misc_feature (177)..(177): n is a, c, g, or t
  misc_feature (180)..(180): n is a, c, g, or t
  misc_feature (183)..(183): n is a, c, g, or t
  misc_feature (186)..(186): n is a, c, g, or t
  misc_feature (195)..(195): n is a, c, g, or t
  misc_feature (198)..(198): n is a, c, g, or t
  misc_feature (204)..(204): n is a, c, g, or t
  misc_feature (210)..(210): n is a, c, g, or t
  misc_feature (213)..(213): n is a, c, g, or t
  misc_feature (222)..(222): n is a, c, g, or t
  misc_feature (225)..(225): n is a, c, g, or t
  misc_feature (228)..(228): n is a, c, g, or t
  misc_feature (234)..(234): n is a, c, g, or t
  misc_feature (237)..(237): n is a, c, g, or t
  misc_feature (240)..(240): n is a, c, g, or t
  misc_feature (243)..(243): n is a, c, g, or t
  misc_feature (249)..(249): n is a, c, g, or t
  misc_feature (255)..(255): n is a, c, g, or t
  misc_feature (264)..(264): n is a, c, g, or t
  misc_feature (267)..(267): n is a, c, g, or t
  misc_feature (270)..(270): n is a, c, g, or t
  misc_feature (276)..(276): n is a, c, g, or t
  misc_feature (288)..(288): n is a, c, g, or t
  misc_feature (303)..(303): n is a, c, g, or t
  misc_feature (306)..(306): n is a, c, g, or t
  misc_feature (309)..(309): n is a, c, g, or t
  misc_feature (318)..(318): n is a, c, g, or t
  misc_feature (321)..(321): n is a, c, g, or t
  misc_feature (327)..(327): n is a, c, g, or t
  misc_feature (333)..(333): n is a, c, g, or t
  misc_feature (342)..(342): n is a, c, g, or t
  misc_feature (348)..(348): n is a, c, g, or t
  misc_feature (357)..(357): n is a, c, g, or t
  misc_feature (360)..(360): n is a, c, g, or t
  misc_feature (363)..(363): n is a, c, g, or t
  misc_feature (369)..(369): n is a, c, g, or t
  misc_feature (372)..(372): n is a, c, g, or t
  misc_feature (375)..(375): n is a, c, g, or t
  misc_feature (381)..(381): n is a, c, g, or t
  misc_feature (387)..(387): n is a, c, g, or t
  misc_feature (390)..(390): n is a, c, g, or t
  misc_feature (393)..(393): n is a, c, g, or t
  misc_feature (396)..(396): n is a, c, g, or t
  misc_feature (399)..(399): n is a, c, g, or t
  misc_feature (402)..(402): n is a, c, g, or t
  misc_feature (405)..(405): n is a, c, g, or t
  misc_feature (408)..(408): n is a, c, g, or t
  misc_feature (411)..(411): n is a, c, g, or t
  misc_feature (423)..(423): n is a, c, g, or t
  misc_feature (429)..(429): n is a, c, g, or t
  misc_feature (432)..(432): n is a, c, g, or t
  misc_feature (435)..(435): n is a, c, g, or t
  misc_feature (441)..(441): n is a, c, g, or t
  misc_feature (444)..(444): n is a, c, g, or t
  misc_feature (450)..(450): n is a, c, g, or t
  misc_feature (459)..(459): n is a, c, g, or t
  misc_feature (471)..(471): n is a, c, g, or t
  misc_feature (474)..(474): n is a, c, g, or t
  misc_feature (477)..(477): n is a, c, g, or t
  misc_feature (486)..(486): n is a, c, g, or t
  misc_feature (495)..(495): n is a, c, g, or t
  misc_feature (498)..(498): n is a, c, g, or t
  misc_feature (507)..(507): n is a, c, g, or t
  misc_feature (510)..(510): n is a, c, g, or t
  misc_feature (516)..(516): n is a, c, g, or t
  misc_feature (519)..(519): n is a, c, g, or t
  misc_feature (522)..(522): n is a, c, g, or t
  misc_feature (528)..(528): n is a, c, g, or t
  misc_feature (537)..(537): n is a, c, g, or t
  misc_feature (540)..(540): n is a, c, g, or t
  misc_feature (543)..(543): n is a, c, g, or t
  misc_feature (546)..(546): n is a, c, g, or t
  misc_feature (549)..(549): n is a, c, g, or t
  misc_feature (552)..(552): n is a, c, g, or t
  misc_feature (561)..(561): n is a, c, g, or t
  misc_feature (567)..(567): n is a, c, g, or t
  misc_feature (570)..(570): n is a, c, g, or t
  misc_feature (576)..(576): n is a, c, g, or t
  misc_feature (585)..(585): n is a, c, g, or t
  misc_feature (588)..(588): n is a, c, g, or t
  misc_feature (591)..(591): n is a, c, g, or t
  misc_feature (597)..(597): n is a, c, g, or t
  misc_feature (600)..(600): n is a, c, g, or t
  misc_feature (606)..(606): n is a, c, g, or t
  misc_feature (609)..(609): n is a, c, g, or t
  misc_feature (612)..(612): n is a, c, g, or t
  misc_feature (615)..(615): n is a, c, g, or t
  misc_feature (618)..(618): n is a, c, g, or t
  misc_feature (627)..(627): n is a, c, g, or t
  misc_feature (630)..(630): n is a, c, g, or t
  misc_feature (636)..(636): n is a, c, g, or t
  misc_feature (642)..(642): n is a, c, g, or t
  misc_feature (645)..(645): n is a, c, g, or t
  misc_feature (651)..(651): n is a, c, g, or t
  misc_feature (663)..(663): n is a, c, g, or t
  misc_feature (666)..(666): n is a, c, g, or t
  misc_feature (675)..(675): n is a, c, g, or t
  misc_feature (678)..(678): n is a, c, g, or t
  misc_feature (681)..(681): n is a, c, g, or t
  misc_feature (684)..(684): n is a, c, g, or t
  misc_feature (687)..(687): n is a, c, g, or t
  misc_feature (693)..(693): n is a, c, g, or t
  misc_feature (696)..(696): n is a, c, g, or t
  misc_feature (699)..(699): n is a, c, g, or t
  misc_feature (702)..(702): n is a, c, g, or t
  misc_feature (705)..(705): n is a, c, g, or t
  misc_feature (708)..(708): n is a, c, g, or t
  misc_feature (714)..(714): n is a, c, g, or t
  misc_feature (717)..(717): n is a, c, g, or t
  misc_feature (720)..(720): n is a, c, g, or t
  misc_feature (726)..(726): n is a, c, g, or t
  misc_feature (732)..(732): n is a, c, g, or t
  misc_feature (735)..(735): n is a, c, g, or t
  misc_feature (738)..(738): n is a, c, g, or t
  misc_feature (744)..(744): n is a, c, g, or t
  misc_feature (747)..(747): n is a, c, g, or t
  misc_feature (753)..(753): n is a, c, g, or t
  misc_feature (762)..(762): n is a, c, g, or t
  misc_feature (768)..(768): n is a, c, g, or t
  misc_feature (771)..(771): n is a, c, g, or t
  misc_feature (774)..(774): n is a, c, g, or t
  misc_feature (780)..(780): n is a, c, g, or t
  misc_feature (786)..(786): n is a, c, g, or t
  misc_feature (792)..(792): n is a, c, g, or t
  misc_feature (795)..(795): n is a, c, g, or t
  misc_feature (798)..(798): n is a, c, g, or t
  misc_feature (801)..(801): n is a, c, g, or t
  misc_feature (804)..(804): n is a, c, g, or t
  misc_feature (810)..(810): n is a, c, g, or t
  misc_feature (813)..(813): n is a, c, g, or t
  misc_feature (819)..(819): n is a, c, g, or t
  misc_feature (822)..(822): n is a, c, g, or t
  misc_feature (825)..(825): n is a, c, g, or t
  misc_feature (828)..(828): n is a, c, g, or t
  misc_feature (831)..(831): n is a, c, g, or t
  misc_feature (834)..(834): n is a, c, g, or t
  misc_feature (840)..(840): n is a, c, g, or t
  misc_feature (843)..(843): n is a, c, g, or t
  misc_feature (846)..(846): n is a, c, g, or t
  misc_feature (852)..(852): n is a, c, g, or t
  misc_feature (855)..(855): n is a, c, g, or t
  misc_feature (858)..(858): n is a, c, g, or t
  misc_feature (861)..(861): n is a, c, g, or t
  misc_feature (864)..(864): n is a, c, g, or t
  misc_feature (867)..(867): n is a, c, g, or t
  misc_feature (879)..(879): n is a, c, g, or t
  misc_feature (882)..(882): n is a, c, g, or t
  misc_feature (888)..(888): n is a, c, g, or t
  misc_feature (897)..(897): n is a, c, g, or t
  misc_feature (900)..(900): n is a, c, g, or t
  misc_feature (927)..(927): n is a, c, g, or t
  misc_feature (930)..(930): n is a, c, g, or t
  misc_feature (933)..(933): n is a, c, g, or t
  misc_feature (939)..(939): n is a, c, g, or t
  misc_feature (954)..(954): n is a, c, g, or t
  misc_feature (957)..(957): n is a, c, g, or t
  misc_feature (960)..(960): n is a, c, g, or t
  misc_feature (963)..(963): n is a, c, g, or t
  misc_feature (972)..(972): n is a, c, g, or t
  misc_feature (975)..(975): n is a, c, g, or t
  misc_feature (981)..(981): n is a, c, g, or t
  misc_feature (987)..(987): n is a, c, g, or t
  misc_feature (1020)..(1020): n is a, c, g, or t
  misc_feature (1026)..(1026): n is a, c, g, or t
  misc_feature (1029)..(1029): n is a, c, g, or t
  misc_feature (1032)..(1032): n is a, c, g, or t
  misc_feature (1038)..(1038): n is a, c, g, or t
  misc_feature (1041)..(1041): n is a, c, g, or t
  misc_feature (1050)..(1050): n is a, c, g, or t
  misc_feature (1053)..(1053): n is a, c, g, or t
  misc_feature (1068)..(1068): n is a, c, g, or t
  misc_feature (1071)..(1071): n is a, c, g, or t
  misc_feature (1080)..(1080): n is a, c, g, or t
  misc_feature (1095)..(1095): n is a, c, g, or t
  misc_feature (1098)..(1098): n is a, c, g, or t
  misc_feature (1104)..(1104): n is a, c, g, or t
  misc_feature (1107)..(1107): n is a, c, g, or t
  misc_feature (1110)..(1110): n is a, c, g, or t
  misc_feature (1113)..(1113): n is a, c, g, or t
  misc_feature (1116)..(1116): n is a, c, g, or t
  misc_feature (1119)..(1119): n is a, c, g, or t
  misc_feature (1122)..(1122): n is a, c, g, or t
  misc_feature (1125)..(1125): n is a, c, g, or t
  misc_feature (1131)..(1131): n is a, c, g, or t
  misc_feature (1137)..(1137): n is a, c, g, or t
  misc_feature (1140)..(1140): n is a, c, g, or t
  misc_feature (1143)..(1143): n is a, c, g, or t
  misc_feature (1146)..(1146): n is a, c, g, or t
  misc_feature (1164)..(1164): n is a, c, g, or t
  misc_feature (1167)..(1167): n is a, c, g, or t
  misc_feature (1170)..(1170): n is a, c, g, or t
  misc_feature (1173)..(1173): n is a, c, g, or t
  misc_feature (1176)..(1176): n is a, c, g, or t
  misc_feature (1179)..(1179): n is a, c, g, or t
  misc_feature (1182)..(1182): n is a, c, g, or t
  misc_feature (1188)..(1188): n is a, c, g, or t
  misc_feature (1197)..(1197): n is a, c, g, or t
  misc_feature (1206)..(1206): n is a, c, g, or t
  misc_feature (1209)..(1209): n is a, c, g, or t
  misc_feature (1212)..(1212): n is a, c, g, or t
  misc_feature (1218)..(1218): n is a, c, g, or t
  misc_feature (1224)..(1224): n is a, c, g, or t
  misc_feature (1239)..(1239): n is a, c, g, or t
  misc_feature (1242)..(1242): n is a, c, g, or t
  misc_feature (1245)..(1245): n is a, c, g, or t
  misc_feature (1251)..(1251): n is a, c, g, or t
  misc_feature (1254)..(1254): n is a, c, g, or t
  misc_feature (1263)..(1263): n is a, c, g, or t
  misc_feature (1275)..(1275): n is a, c, g, or t
  misc_feature (1278)..(1278): n is a, c, g, or t
  misc_feature (1284)..(1284): n is a, c, g, or t
  misc_feature (1287)..(1287): n is a, c, g, or t
  misc_feature (1293)..(1293): n is a, c, g, or t
  misc_feature (1311)..(1311): n is a, c, g, or t
  misc_feature (1314)..(1314): n is a, c, g, or t
  misc_feature (1320)..(1320): n is a, c, g, or t
  misc_feature (1323)..(1323): n is a, c, g, or t
  misc_feature (1326)..(1326): n is a, c, g, or t
  misc_feature (1329)..(1329): n is a, c, g, or t
  misc_feature (1332)..(1332): n is a, c, g, or t
  misc_feature (1335)..(1335): n is a, c, g, or t
  misc_feature (1338)..(1338): n is a, c, g, or t
  misc_feature (1341)..(1341): n is a, c, g, or t
  misc_feature (1344)..(1344): n is a, c, g, or t
  misc_feature (1347)..(1347): n is a, c, g, or t
  misc_feature (1353)..(1353): n is a, c, g, or t
  misc_feature (1356)..(1356): n is a, c, g, or t
  misc_feature (1359)..(1359): n is a, c, g, or t
  misc_feature (1362)..(1362): n is a, c, g, or t
  misc_feature (1365)..(1365): n is a, c, g, or t
  misc_feature (1368)..(1368): n is a, c, g, or t
  misc_feature (1374)..(1374): n is a, c, g, or t
  misc_feature (1377)..(1377): n is a, c, g, or t
  misc_feature (1383)..(1383): n is a, c, g, or t
  misc_feature (1386)..(1386): n is a, c, g, or t
  misc_feature (1389)..(1389): n is a, c, g, or t
  misc_feature (1392)..(1392): n is a, c, g, or t
  misc_feature (1395)..(1395): n is a, c, g, or t
  misc_feature (1401)..(1401): n is a, c, g, or t
  misc_feature (1404)..(1404): n is a, c, g, or t
  misc_feature (1407)..(1407): n is a, c, g, or t
  misc_feature (1416)..(1416): n is a, c, g, or t
  misc_feature (1419)..(1419): n is a, c, g, or t
  misc_feature (1425)..(1425): n is a, c, g, or t
  misc_feature (1428)..(1428): n is a, c, g, or t
  misc_feature (1434)..(1434): n is a, c, g, or t
  misc_feature (1440)..(1440): n is a, c, g, or t
  misc_feature (1443)..(1443): n is a, c, g, or t
  misc_feature (1446)..(1446): n is a, c, g, or t
  misc_feature (1449)..(1449): n is a, c, g, or t
  misc_feature (1455)..(1455): n is a, c, g, or t
  misc_feature (1458)..(1458): n is a, c, g, or t
  misc_feature (1461)..(1461): n is a, c, g, or t
  misc_feature (1467)..(1467): n is a, c, g, or t
  misc_feature (1470)..(1470): n is a, c, g, or t
  misc_feature (1474)..(1539): TpoR Transmembrane Domain
  misc_feature (1542)..(1542): n is a, c, g, or t
  misc_feature (1554)..(1554): n is a, c, g, or t
  misc_feature (1557)..(1557): n is a, c, g, or t
  misc_feature (1566)..(1566): n is a, c, g, or t
  misc_feature (1569)..(1569): n is a, c, g, or t
  misc_feature (1572)..(1572): n is a, c, g, or t
  misc_feature (1575)..(1575): n is a, c, g, or t
  misc_feature (1581)..(1581): n is a, c, g, or t
  misc_feature (1584)..(1584): n is a, c, g, or t
  misc_feature (1590)..(1590): n is a, c, g, or t
  misc_feature (1593)..(1593): n is a, c, g, or t
  misc_feature (1596)..(1596): n is a, c, g, or t
  misc_feature (1599)..(1599): n is a, c, g, or t
  misc_feature (1605)..(1605): n is a, c, g, or t
  misc_feature (1611)..(1611): n is a, c, g, or t
  misc_feature (1614)..(1614): n is a, c, g, or t
  misc_feature (1617)..(1617): n is a, c, g, or t
  misc_feature (1620)..(1620): n is a, c, g, or t
  misc_feature (1629)..(1629): n is a, c, g, or t
  misc_feature (1632)..(1632): n is a, c, g, or t
  misc_feature (1638)..(1638): n is a, c, g, or t
  misc_feature (1641)..(1641): n is a, c, g, or t
  misc_feature (1644)..(1644): n is a, c, g, or t
  misc_feature (1647)..(1647): n is a, c, g, or t
  misc_feature (1650)..(1650): n is a, c, g, or t
  misc_feature (1653)..(1653): n is a, c, g, or t
  misc_feature (1656)..(1656): n is a, c, g, or t
  misc_feature (1662)..(1662): n is a, c, g, or t
  misc_feature (1665)..(1665): n is a, c, g, or t
  misc_feature (1668)..(1668): n is a, c, g, or t
  misc_feature (1671)..(1671): n is a, c, g, or t
  misc_feature (1677)..(1677): n is a, c, g, or t
  misc_feature (1689)..(1689): n is a, c, g, or t
  misc_feature (1695)..(1695): n is a, c, g, or t
  misc_feature (1698)..(1698): n is a, c, g, or t
  misc_feature (1701)..(1701): n is a, c, g, or t
  misc_feature (1704)..(1704): n is a, c, g, or t
  misc_feature (1713)..(1713): n is a, c, g, or t
  misc_feature (1716)..(1716): n is a, c, g, or t
  misc_feature (1722)..(1722): n is a, c, g, or t
  misc_feature (1725)..(1725): n is a, c, g, or t
  misc_feature (1731)..(1731): n is a, c, g, or t
  misc_feature (1734)..(1734): n is a, c, g, or t
  misc_feature (1737)..(1737): n is a, c, g, or t
  misc_feature (1740)..(1740): n is a, c, g, or t
  misc_feature (1743)..(1743): n is a, c, g, or t
  misc_feature (1746)..(1746): n is a, c, g, or t
  misc_feature (1752)..(1752): n is a, c, g, or t
  misc_feature (1755)..(1755): n is a, c, g, or t
  misc_feature (1761)..(1761): n is a, c, g, or t
  misc_feature (1776)..(1776): n is a, c, g, or t
  misc_feature (1779)..(1779): n is a, c, g, or t
  misc_feature (1782)..(1782): n is a, c, g, or t
  misc_feature (1788)..(1788): n is a, c, g, or t
  misc_feature (1791)..(1791): n is a, c, g, or t
  misc_feature (1797)..(1797): n is a, c, g, or t
  misc_feature (1800)..(1800): n is a, c, g, or t
  misc_feature (1803)..(1803): n is a, c, g, or t
  misc_feature (1809)..(1809): n is a, c, g, or t
  misc_feature (1812)..(1812): n is a, c, g, or t
  misc_feature (1815)..(1815): n is a, c, g, or t
  misc_feature (1818)..(1818): n is a, c, g, or t
  misc_feature (1824)..(1824): n is a, c, g, or t
  misc_feature (1827)..(1827): n is a, c, g, or t
  misc_feature (1833)..(1833): n is a, c, g, or t
  misc_feature (1839)..(1839): n is a, c, g, or t
  misc_feature (1842)..(1842): n is a, c, g, or t
  misc_feature (1845)..(1845): n is a, c, g, or t
  misc_feature (1854)..(1854): n is a, c, g, or t
  misc_feature (1857)..(1857): n is a, c, g, or t
  misc_feature (1866)..(1866): n is a, c, g, or t
  misc_feature (1875)..(1875): n is a, c, g, or t
  misc_feature (1881)..(1881): n is a, c, g, or t
  misc_feature (1884)..(1884): n is a, c, g, or t
  misc_feature (1887)..(1887): n is a, c, g, or t
  misc_feature (1890)..(1890): n is a, c, g, or t
  misc_feature (1905)..(1905): n is a, c, g, or t
atgccnwsntgggcnytnttyatggtnacnwsntgyytnytnytngcnccncaraayytngcncargtnwsnwsncargaygtnwsnytnytngcnwsngaywsngarccnytnaartgyttywsnmgnacnttygargayytnacntgyttytgggaygargargargcngcnccnwsnggnacntaycarytnytntaygcntayccnmgngaraarccnmgngcntgyccnytnwsnwsncarwsnatgccncayttyggnacnmgntaygtntgycarttyccngaycargargargtnmgnytnttyttyccnytncayytntgggtnaaraaygtnttyytnaaycaracnmgnacncarmgngtnytnttygtngaywsngtnggnytnccngcnccnccnwsnathathaargcnatgggnggnwsncarccnggngarytncarathwsntgggargarccngcnccngarathwsngayttyytnmgntaygarytnmgntayggnccnmgngayccnaaraaywsnacnggnccnacngtnathcarytnathgcnacngaracntgytgyccngcnytncarmgnccncaywsngcnwsngcnytngaycarwsnccntgygcncarccnacnatgccntggcargayggnccnaarcaracnwsnccnwsnmgngargcnwsngcnytnacngcngarggnggnwsntgyytnathwsnggnytncarccnggnaaywsntaytggytncarytnmgnwsngarccngayggnathwsnytnggnggnwsntggggnwsntggwsnytnccngtnacngtngayytnccnggngaygcngtngcnytnggnytncartgyttyacnytngayytnaaraaygtnacntgycartggcarcarcargaycaygcnwsnwsncarggnttyttytaycaywsnmgngcnmgntgytgyccnmgngaymgntayccnathtgggaraaytgygargargargaraaracnaayccnggnytncaracnccncarttywsnmgntgycayttyaarwsnmgnaaygaywsnathathcayathytngtngargtnacnacngcnccnggnacngtncaywsntayytnggnwsnccnttytggathcaycargcngtnmgnytnccnacnccnaayytncaytggmgngarathwsnwsnggncayytngarytngartggcarcayccnwsnwsntgggcngcncargaracntgytaycarytnmgntayacnggngarggncaycargaytggaargtnytngarccnccnytnggngcnmgnggnggnacnytngarytnmgnccnmgnwsnmgntaymgnytncarytnmgngcnmgnytnaayggnccnacntaycarggnccntggwsnwsntggwsngayccnacnmgngtngaracngcnacngaracngcntggathwsnytngtnacngcnytncayytngtnytnggnytnwsngcngtnytnggnytnytnytnytnmgntggcarttyccngcncaytaymgnmgnytnmgncaygcnytntggccnwsnytnccngayytncaymgngtnytnggncartayytnmgngayacngcngcnytnwsnccnccnaargcnacngtnwsngayacntgygargargtngarccnwsnytnytngarathytnccnaarwsnwsngarmgnacnccnytnccnytntgywsnwsncargcncaratggaytaymgnmgnytncarccnwsntgyytnggnacnatgccnytnwsngtntgyccnccnatggcngarwsnggnwsntgytgyacnacncayathgcnaaycaywsntayytnccnytnwsntaytggcarcarccntrrtrr

SEQ ID NO: 16 - DNA, 1746 bp, Artificial Sequence
  TpoR.delta60
  misc_feature (6)..(6): n is a, c, g, or t
  misc_feature (9)..(9): n is a, c, g, or t
  misc_feature (15)..(15): n is a, c, g, or t
  misc_feature (18)..(18): n is a, c, g, or t
  misc_feature (27)..(27): n is a, c, g, or t
  misc_feature (30)..(30): n is a, c, g, or t
  misc_feature (33)..(33): n is a, c, g, or t
  misc_feature (39)..(39): n is a, c, g, or t
  misc_feature (42)..(42): n is a, c, g, or t
  misc_feature (45)..(45): n is a, c, g, or t
  misc_feature (48)..(48): n is a, c, g, or t
  misc_feature (51)..(51): n is a, c, g, or t
  misc_feature (60)..(60): n is a, c, g, or t
  misc_feature (63)..(63): n is a, c, g, or t
  misc_feature (69)..(69): n is a, c, g, or t
  misc_feature (72)..(72): n is a, c, g, or t
  misc_feature (75)..(75): n is a, c, g, or t
  misc_feature (84)..(84): n is a, c, g, or t
  misc_feature (87)..(87): n is a, c, g, or t
  misc_feature (90)..(90): n is a, c, g, or t
  misc_feature (93)..(93): n is a, c, g, or t
  misc_feature (96)..(96): n is a, c, g, or t
  misc_feature (99)..(99): n is a, c, g, or t
  misc_feature (105)..(105): n is a, c, g, or t
  misc_feature (111)..(111): n is a, c, g, or t
  misc_feature (114)..(114): n is a, c, g, or t
  misc_feature (126)..(126): n is a, c, g, or t
  misc_feature (129)..(129): n is a, c, g, or t
  misc_feature (132)..(132): n is a, c, g, or t
  misc_feature (144)..(144): n is a, c, g, or t
  misc_feature (147)..(147): n is a, c, g, or t
  misc_feature (171)..(171): n is a, c, g, or t
  misc_feature (174)..(174): n is a, c, g, or t
  misc_feature (177)..(177): n is a, c, g, or t
  misc_feature (180)..(180): n is a, c, g, or t
  misc_feature (183)..(183): n is a, c, g, or t
  misc_feature (186)..(186): n is a, c, g, or t
  misc_feature (195)..(195): n is a, c, g, or t
  misc_feature (198)..(198): n is a, c, g, or t
  misc_feature (204)..(204): n is a, c, g, or t
  misc_feature (210)..(210): n is a, c, g, or t
  misc_feature (213)..(213): n is a, c, g, or t
  misc_feature (222)..(222): n is a, c, g, or t
  misc_feature (225)..(225): n is a, c, g, or t
  misc_feature (228)..(228): n is a, c, g, or t
  misc_feature (234)..(234): n is a, c, g, or t
  misc_feature (237)..(237): n is a, c, g, or t
  misc_feature (240)..(240): n is a, c, g, or t
  misc_feature (243)..(243): n is a, c, g, or t
  misc_feature (249)..(249): n is a, c, g, or t
  misc_feature (255)..(255): n is a, c, g, or t
  misc_feature (264)..(264): n is a, c, g, or t
  misc_feature (267)..(267): n is a, c, g, or t
  misc_feature (270)..(270): n is a, c, g, or t
  misc_feature (276)..(276): n is a, c, g, or t
  misc_feature (288)..(288): n is a, c, g, or t
  misc_feature (303)..(303): n is a, c, g, or t
  misc_feature (306)..(306): n is a, c, g, or t
  misc_feature (309)..(309): n is a, c, g, or t
  misc_feature (318)..(318): n is a, c, g, or t
  misc_feature (321)..(321): n is a, c, g, or t
  misc_feature (327)..(327): n is a, c, g, or t
  misc_feature (333)..(333): n is a, c, g, or t
  misc_feature (342)..(342): n is a, c, g, or t
  misc_feature (348)..(348): n is a, c, g, or t
  misc_feature (357)..(357): n is a, c, g, or t
  misc_feature (360)..(360): n is a, c, g, or t
  misc_feature (363)..(363): n is a, c, g, or t
  misc_feature (369)..(369): n is a, c, g, or t
  misc_feature (372)..(372): n is a, c, g, or t
  misc_feature (375)..(375): n is a, c, g, or t
  misc_feature (381)..(381): n is a, c, g, or t
  misc_feature (387)..(387): n is a, c, g, or t
  misc_feature (390)..(390): n is a, c, g, or t
  misc_feature (393)..(393): n is a, c, g, or t
  misc_feature (396)..(396): n is a, c, g, or t
  misc_feature (399)..(399): n is a, c, g, or t
  misc_feature (402)..(402): n is a, c, g, or t
  misc_feature (405)..(405): n is a, c, g, or t
  misc_feature (408)..(408): n is a, c, g, or t
  misc_feature (411)..(411): n is a, c, g, or t
  misc_feature (423)..(423): n is a, c, g, or t
  misc_feature (429)..(429): n is a, c, g, or t
  misc_feature (432)..(432): n is a, c, g, or t
  misc_feature (435)..(435): n is a, c, g, or t
  misc_feature (441)..(441): n is a, c, g, or t
  misc_feature (444)..(444): n is a, c, g, or t
  misc_feature (450)..(450): n is a, c, g, or t
  misc_feature (459)..(459): n is a, c, g, or t
  misc_feature (471)..(471): n is a, c, g, or t
  misc_feature (474)..(474): n is a, c, g, or t
  misc_feature (477)..(477): n is a, c, g, or t
  misc_feature (486)..(486): n is a, c, g, or t
  misc_feature (495)..(495): n is a, c, g, or t
  misc_feature (498)..(498): n is a, c, g, or t
  misc_feature (507)..(507): n is a, c, g, or t
  misc_feature (510)..(510): n is a, c, g, or t
  misc_feature (516)..(516): n is a, c, g, or t
  misc_feature (519)..(519): n is a, c, g, or t
  misc_feature (522)..(522): n is a, c, g, or t
  misc_feature (528)..(528): n is a, c, g, or t
  misc_feature (537)..(537): n is a, c, g, or t
  misc_feature (540)..(540): n is a, c, g, or t
  misc_feature (543)..(543): n is a, c, g, or t
  misc_feature (546)..(546): n is a, c, g, or t
  misc_feature (549)..(549): n is a, c, g, or t
  misc_feature (552)..(552): n is a, c, g, or t
  misc_feature (561)..(561): n is a, c, g, or t
  misc_feature (567)..(567): n is a, c, g, or t
  misc_feature (570)..(570): n is a, c, g, or t
  misc_feature (576)..(576): n is a, c, g, or t
  misc_feature (585)..(585): n is a, c, g, or t
  misc_feature (588)..(588): n is a, c, g, or t
  misc_feature (591)..(591): n is a, c, g, or t
  misc_feature (597)..(597): n is a, c, g, or t
  misc_feature (600)..(600): n is a, c, g, or t
  misc_feature (606)..(606): n is a, c, g, or t
  misc_feature (609)..(609): n is a, c, g, or t
  misc_feature (612)..(612): n is a, c, g, or t
  misc_feature (615)..(615): n is a, c, g, or t
  misc_feature (618)..(618): n is a, c, g, or t
  misc_feature (627)..(627): n is a, c, g, or t
  misc_feature (630)..(630): n is a, c, g, or t
  misc_feature (636)..(636): n is a, c, g, or t
  misc_feature (642)..(642): n is a, c, g, or t
  misc_feature (645)..(645): n is a, c, g, or t
  misc_feature (651)..(651): n is a, c, g, or t
  misc_feature (663)..(663): n is a, c, g, or t
  misc_feature (666)..(666): n is a, c, g, or t
  misc_feature (675)..(675): n is a, c, g, or t
  misc_feature (678)..(678): n is a, c, g, or t
  misc_feature (681)..(681): n is a, c, g, or t
  misc_feature (684)..(684): n is a, c, g, or t
  misc_feature (687)..(687): n is a, c, g, or t
  misc_feature (693)..(693): n is a, c, g, or t
  misc_feature (696)..(696): n is a, c, g, or t
  misc_feature (699)..(699): n is a, c, g, or t
  misc_feature (702)..(702): n is a, c, g, or t
  misc_feature (705)..(705): n is a, c, g, or t
  misc_feature (708)..(708): n is a, c, g, or t
  misc_feature (714)..(714): n is a, c, g, or t
  misc_feature (717)..(717): n is a, c, g, or t
  misc_feature (720)..(720): n is a, c, g, or t
  misc_feature (726)..(726): n is a, c, g, or t
  misc_feature (732)..(732): n is a, c, g, or t
  misc_feature (735)..(735): n is a, c, g, or t
  misc_feature (738)..(738): n is a, c, g, or t
  misc_feature (744)..(744): n is a, c, g, or t
  misc_feature (747)..(747): n is a, c, g, or t
  misc_feature (753)..(753): n is a, c, g, or t
  misc_feature (762)..(762): n is a, c, g, or t
  misc_feature (768)..(768): n is a, c, g, or t
  misc_feature (771)..(771): n is a, c, g, or t
  misc_feature (774)..(774): n is a, c, g, or t
  misc_feature (780)..(780): n is a, c, g, or t
  misc_feature (786)..(786): n is a, c, g, or t
  misc_feature (792)..(792): n is a, c, g, or t
  misc_feature (795)..(795): n is a, c, g, or t
  misc_feature (798)..(798): n is a, c, g, or t
  misc_feature (801)..(801): n is a, c, g, or t
  misc_feature (804)..(804): n is a, c, g, or t
  misc_feature (810)..(810): n is a, c, g, or t
  misc_feature (813)..(813): n is a, c, g, or t
  misc_feature (819)..(819): n is a, c, g, or t
  misc_feature (822)..(822): n is a, c, g, or t
  misc_feature (825)..(825): n is a, c, g, or t
  misc_feature (828)..(828): n is a, c, g, or t
  misc_feature (831)..(831): n is a, c, g, or t
  misc_feature (834)..(834): n is a, c, g, or t
  misc_feature (840)..(840): n is a, c, g, or t
  misc_feature (843)..(843): n is a, c, g, or t
  misc_feature (846)..(846): n is a, c, g, or t
  misc_feature (852)..(852): n is a, c, g, or t
  misc_feature (855)..(855): n is a, c, g, or t
  misc_feature (858)..(858): n is a, c, g, or t
  misc_feature (861)..(861): n is a, c, g, or t
  misc_feature (864)..(864): n is a, c, g, or t
  misc_feature (867)..(867): n is a, c, g, or t
  misc_feature (879)..(879): n is a, c, g, or t
  misc_feature (882)..(882): n is a, c, g, or t
  misc_feature (888)..(888): n is a, c, g, or t
  misc_feature (897)..(897): n is a, c, g, or t
  misc_feature (900)..(900): n is a, c, g, or t
  misc_feature (927)..(927): n is a, c, g, or t
  misc_feature (930)..(930): n is a, c, g, or t
  misc_feature (933)..(933): n is a, c, g, or t
  misc_feature (939)..(939): n is a, c, g, or t
  misc_feature (954)..(954): n is a, c, g, or t
  misc_feature (957)..(957): n is a, c, g, or t
  misc_feature (960)..(960): n is a, c, g, or t
  misc_feature (963)..(963): n is a, c, g, or t
  misc_feature (972)..(972): n is a, c, g, or t
  misc_feature (975)..(975): n is a, c, g, or t
  misc_feature (981)..(981): n is a, c, g, or t
  misc_feature (987)..(987): n is a, c, g, or t
  misc_feature (1020)..(1020): n is a, c, g, or t
  misc_feature (1026)..(1026): n is a, c, g, or t
  misc_feature (1029)..(1029): n is a, c, g, or t
  misc_feature (1032)..(1032): n is a, c, g, or t
  misc_feature (1038)..(1038): n is a, c, g, or t
  misc_feature (1041)..(1041): n is a, c, g, or t
  misc_feature (1050)..(1050): n is a, c, g, or t
  misc_feature (1053)..(1053): n is a, c, g, or t
  misc_feature (1068)..(1068): n is a, c, g, or t
  misc_feature (1071)..(1071): n is a, c, g, or t
  misc_feature (1080)..(1080): n is a, c, g, or t
  misc_feature (1095)..(1095): n is a, c, g, or t
  misc_feature (1098)..(1098): n is a, c, g, or t
  misc_feature (1104)..(1104): n is a, c, g, or t
  misc_feature (1107)..(1107): n is a, c, g, or t
  misc_feature (1110)..(1110): n is a, c, g, or t
  misc_feature (1113)..(1113): n is a, c, g, or t
  misc_feature (1116)..(1116): n is a, c, g, or t
  misc_feature (1119)..(1119): n is a, c, g, or t
  misc_feature (1122)..(1122): n is a, c, g, or t
  misc_feature (1125)..(1125): n is a, c, g, or t
  misc_feature (1131)..(1131): n is a, c, g, or t
  misc_feature (1137)..(1137): n is a, c, g, or t
  misc_feature (1140)..(1140): n is a, c, g, or t
  misc_feature (1143)..(1143): n is a, c, g, or t
  misc_feature (1146)..(1146): n is a, c, g, or t
  misc_feature (1164)..(1164): n is a, c, g, or t
  misc_feature (1167)..(1167): n is a, c, g, or t
  misc_feature (1170)..(1170): n is a, c, g, or t
  misc_feature (1173)..(1173): n is a, c, g, or t
  misc_feature (1176)..(1176): n is a, c, g, or t
  misc_feature (1179)..(1179): n is a, c, g, or t
  misc_feature (1182)..(1182): n is a, c, g, or t
  misc_feature (1188)..(1188): n is a, c, g, or t
  misc_feature (1197)..(1197): n is a, c, g, or t
  misc_feature (1206)..(1206): n is a, c, g, or t
  misc_feature (1209)..(1209): n is a, c, g, or t
  misc_feature (1212)..(1212): n is a, c, g, or t
  misc_feature (1218)..(1218): n is a, c, g, or t
  misc_feature (1224)..(1224): n is a, c, g, or t
  misc_feature (1239)..(1239): n is a, c, g, or t
  misc_feature (1242)..(1242): n is a, c, g, or t
  misc_feature (1245)..(1245): n is a, c, g, or t
  misc_feature (1251)..(1251): n is a, c, g, or t
  misc_feature (1254)..(1254): n is a, c, g, or t
  misc_feature (1263)..(1263): n is a, c, g, or t
  misc_feature (1275)..(1275): n is a, c, g, or t
  misc_feature (1278)..(1278): n is a, c, g, or t
  misc_feature (1284)..(1284): n is a, c, g, or t
  misc_feature (1287)..(1287): n is a, c, g, or t
  misc_feature (1293)..(1293): n is a, c, g, or t
  misc_feature (1311)..(1311): n is a, c, g, or t
  misc_feature (1314)..(1314): n is a, c, g, or t
  misc_feature (1320)..(1320): n is a, c, g, or t
  misc_feature (1323)..(1323): n is a, c, g, or t
  misc_feature (1326)..(1326): n is a, c, g, or t
  misc_feature (1329)..(1329): n is a, c, g, or t
  misc_feature (1332)..(1332): n is a, c, g, or t
  misc_feature (1335)..(1335): n is a, c, g, or t
  misc_feature (1338)..(1338): n is a, c, g, or t
  misc_feature (1341)..(1341): n is a, c, g, or t
  misc_feature (1344)..(1344): n is a, c, g, or t
  misc_feature (1347)..(1347): n is a, c, g, or t
  misc_feature (1353)..(1353): n is a, c, g, or t
  misc_feature (1356)..(1356): n is a, c, g, or t
  misc_feature (1359)..(1359): n is a, c, g, or t
  misc_feature (1362)..(1362): n is a, c, g, or t
  misc_feature (1365)..(1365): n is a, c, g, or t
  misc_feature (1368)..(1368): n is a, c, g, or t
  misc_feature (1374)..(1374): n is a, c, g, or t
  misc_feature (1377)..(1377): n is a, c, g, or t
  misc_feature (1383)..(1383): n is a, c, g, or t
  misc_feature (1386)..(1386): n is a, c, g, or t
  misc_feature (1389)..(1389): n is a, c, g, or t
  misc_feature (1392)..(1392): n is a, c, g, or t
  misc_feature (1395)..(1395): n is a, c, g, or t
  misc_feature (1401)..(1401): n is a, c, g, or t
  misc_feature (1404)..(1404): n is a, c, g, or t
  misc_feature (1407)..(1407): n is a, c, g, or t
  misc_feature (1416)..(1416): n is a, c, g, or t
  misc_feature (1419)..(1419): n is a, c, g, or t
  misc_feature (1425)..(1425): n is a, c, g, or t
  misc_feature (1428)..(1428): n is a, c, g, or t
  misc_feature (1434)..(1434): n is a, c, g, or t
  misc_feature (1440)..(1440): n is a, c, g, or t
  misc_feature (1443)..(1443): n is a, c, g, or t
  misc_feature (1446)..(1446): n is a, c, g, or t
  misc_feature (1449)..(1449): n is a, c, g, or t
  misc_feature (1455)..(1455): n is a, c, g, or t
  misc_feature (1458)..(1458): n is a, c, g, or t
  misc_feature (1461)..(1461): n is a, c, g, or t
  misc_feature (1467)..(1467): n is a, c, g, or t
  misc_feature (1470)..(1470): n is a, c, g, or t
  misc_feature (1479)..(1479): n is a, c, g, or t
  misc_feature (1482)..(1482): n is a, c, g, or t
  misc_feature (1485)..(1485): n is a, c, g, or t
  misc_feature (1488)..(1488): n is a, c, g, or t
  misc_feature (1491)..(1491): n is a, c, g, or t
  misc_feature (1494)..(1494): n is a, c, g, or t
  misc_feature (1500)..(1500): n is a, c, g, or t
  misc_feature (1503)..(1503): n is a, c, g, or t
  misc_feature (1506)..(1506): n is a, c, g, or t
  misc_feature (1509)..(1509): n is a, c, g, or t
  misc_feature (1512)..(1512): n is a, c, g, or t
  misc_feature (1515)..(1515): n is a, c, g, or t
  misc_feature (1518)..(1518): n is a, c, g, or t
  misc_feature (1521)..(1521): n is a, c, g, or t
  misc_feature (1524)..(1524): n is a, c, g, or t
  misc_feature (1527)..(1527): n is a, c, g, or t
  misc_feature (1530)..(1530): n is a, c, g, or t
  misc_feature (1533)..(1533): n is a, c, g, or t
  misc_feature (1536)..(1536): n is a, c, g, or t
  misc_feature (1539)..(1539): n is a, c, g, or t
  misc_feature (1542)..(1542): n is a, c, g, or t
  misc_feature (1554)..(1554): n is a, c, g, or t
  misc_feature (1557)..(1557): n is a, c, g, or t
  misc_feature (1566)..(1566): n is a, c, g, or t
  misc_feature (1569)..(1569): n is a, c, g, or t
  misc_feature (1572)..(1572): n is a, c, g, or t
  misc_feature (1575)..(1575): n is a, c, g, or t
  misc_feature (1581)..(1581): n is a, c, g, or t
  misc_feature (1584)..(1584): n is a, c, g, or t
  misc_feature (1590)..(1590): n is a, c, g, or t
  misc_feature (1593)..(1593): n is a, c, g, or t
  misc_feature (1596)..(1596): n is a, c, g, or t
  misc_feature (1599)..(1599): n is a, c, g, or t
  misc_feature (1605)..(1605): n is a, c, g, or t
  misc_feature (1611)..(1611): n is a, c, g, or t
  misc_feature (1614)..(1614): n is a, c, g, or t
  misc_feature (1617)..(1617): n is a, c, g, or t
  misc_feature (1620)..(1620): n is a, c, g, or t
  misc_feature (1629)..(1629): n is a, c, g, or t
  misc_feature (1632)..(1632): n is a, c, g, or t
  misc_feature (1638)..(1638): n is a, c, g, or t
  misc_feature (1641)..(1641): n is a, c, g, or t
  misc_feature (1644)..(1644): n is a, c, g, or t
  misc_feature (1647)..(1647): n is a, c, g, or t
  misc_feature (1650)..(1650): n is a, c, g, or t
  misc_feature (1653)..(1653): n is a, c, g, or t
  misc_feature (1656)..(1656): n is a, c, g, or t
  misc_feature (1662)..(1662): n is a, c, g, or t
  misc_feature (1665)..(1665): n is a, c, g, or t
  misc_feature (1668)..(1668): n is a, c, g, or t
  misc_feature (1671)..(1671): n is a, c, g, or t
  misc_feature (1677)..(1677): n is a, c, g, or t
  misc_feature (1689)..(1689): n is a, c, g, or t
  misc_feature (1695)..(1695): n is a, c, g, or t
  misc_feature (1698)..(1698): n is a, c, g, or t
  misc_feature (1701)..(1701): n is a, c, g, or t
  misc_feature (1704)..(1704): n is a, c, g, or t
  misc_feature (1713)..(1713): n is a, c, g, or t
  misc_feature (1716)..(1716): n is a, c, g, or t
  misc_feature (1722)..(1722): n is a, c, g, or t
  misc_feature (1725)..(1725): n is a, c, g, or t
  misc_feature (1731)..(1731): n is a, c, g, or t
  misc_feature (1734)..(1734): n is a, c, g, or t
  misc_feature (1737)..(1737): n is a, c, g, or t
  misc_feature (1740)..(1740): n is a, c, g, or t
atgccnwsntgggcnytnttyatggtnacnwsntgyytnytnytngcnccncaraayytngcncargtnwsnwsncargaygtnwsnytnytngcnwsngaywsngarccnytnaartgyttywsnmgnacnttygargayytnacntgyttytgggaygargargargcngcnccnwsnggnacntaycarytnytntaygcntayccnmgngaraarccnmgngcntgyccnytnwsnwsncarwsnatgccncayttyggnacnmgntaygtntgycarttyccngaycargargargtnmgnytnttyttyccnytncayytntgggtnaaraaygtnttyytnaaycaracnmgnacncarmgngtnytnttygtngaywsngtnggnytnccngcnccnccnwsnathathaargcnatgggnggnwsncarccnggngarytncarathwsntgggargarccngcnccngarathwsngayttyytnmgntaygarytnmgntayggnccnmgngayccnaaraaywsnacnggnccnacngtnathcarytnathgcnacngaracntgytgyccngcnytncarmgnccncaywsngcnwsngcnytngaycarwsnccntgygcncarccnacnatgccntggcargayggnccnaarcaracnwsnccnwsnmgngargcnwsngcnytnacngcngarggnggnwsntgyytnathwsnggnytncarccnggnaaywsntaytggytncarytnmgnwsngarccngayggnathwsnytnggnggnwsntggggnwsntggwsnytnccngtnacngtngayytnccnggngaygcngtngcnytnggnytncartgyttyacnytngayytnaaraaygtnacntgycartggcarcarcargaycaygcnwsnwsncarggnttyttytaycaywsnmgngcnmgntgytgyccnmgngaymgntayccnathtgggaraaytgygargargargaraaracnaayccnggnytncaracnccncarttywsnmgntgycayttyaarwsnmgnaaygaywsnathathcayathytngtngargtnacnacngcnccnggnacngtncaywsntayytnggnwsnccnttytggathcaycargcngtnmgnytnccnacnccnaayytncaytggmgngarathwsnwsnggncayytngarytngartggcarcayccnwsnwsntgggcngcncargaracntgytaycarytnmgntayacnggngarggncaycargaytggaargtnytngarccnccnytnggngcnmgnggnggnacnytngarytnmgnccnmgnwsnmgntaymgnytncarytnmgngcnmgnytnaayggnccnacntaycarggnccntggwsnwsntggwsngayccnacnmgngtngaracngcnacngaracngcntggathwsnytngtnacngcnytncayytngtnytnggnytnwsngcngtnytnggnytnytnytnytnmgntggcarttyccngcncaytaymgnmgnytnmgncaygcnytntggccnwsnytnccngayytncaymgngtnytnggncartayytnmgngayacngcngcnytnwsnccnccnaargcnacngtnwsngayacntgygargargtngarccnwsnytnytngarathytnccnaarwsnwsngarmgnacnccnytntrrtrr

SEQ ID NO: 17 - DNA, 1884 bp, Artificial Sequence
  TpoR.TpoR-cyt.IL2r-beta-cyt
  misc_feature (6)..(6): n is a, c, g, or t
  misc_feature (9)..(9): n is a, c, g, or t
  misc_feature (15)..(15): n is a, c, g, or t
  misc_feature (18)..(18): n is a, c, g, or t
  misc_feature (27)..(27): n is a, c, g, or t
  misc_feature (30)..(30): n is a, c, g, or t
  misc_feature (33)..(33): n is a, c, g, or t
  misc_feature (39)..(39): n is a, c, g, or t
  misc_feature (42)..(42): n is a, c, g, or t
  misc_feature (45)..(45): n is a, c, g, or t
  misc_feature (48)..(48): n is a, c, g, or t
  misc_feature (51)..(51): n is a, c, g, or t
  misc_feature (60)..(60): n is a, c, g, or t
  misc_feature (63)..(63): n is a, c, g, or t
  misc_feature (69)..(69): n is a, c, g, or t
  misc_feature (72)..(72): n is a, c, g, or t
  misc_feature (75)..(75): n is a, c, g, or t
  misc_feature (84)..(84): n is a, c, g, or t
  misc_feature (87)..(87): n is a, c, g, or t
  misc_feature (90)..(90): n is a, c, g, or t
  misc_feature (93)..(93): n is a, c, g, or t
  misc_feature (96)..(96): n is a, c, g, or t
  misc_feature (99)..(99): n is a, c, g, or t
  misc_feature (105)..(105): n is a, c, g, or t
  misc_feature (111)..(111): n is a, c, g, or t
  misc_feature (114)..(114): n is a, c, g, or t
  misc_feature (126)..(126): n is a, c, g, or t
  misc_feature (129)..(129): n is a, c, g, or t
  misc_feature (132)..(132): n is a, c, g, or t
  misc_feature (144)..(144): n is a, c, g, or t
  misc_feature (147)..(147): n is a, c, g, or t
  misc_feature (171)..(171): n is a, c, g, or t
  misc_feature (174)..(174): n is a, c, g, or t
  misc_feature (177)..(177): n is a, c, g, or t
  misc_feature (180)..(180): n is a, c, g, or t
  misc_feature (183)..(183): n is a, c, g, or t
  misc_feature (186)..(186): n is a, c, g, or t
  misc_feature (195)..(195): n is a, c, g, or t
  misc_feature (198)..(198): n is a, c, g, or t
  misc_feature (204)..(204): n is a, c, g, or t
  misc_feature (210)..(210): n is a, c, g, or t
  misc_feature (213)..(213): n is a, c, g, or t
  misc_feature (222)..(222): n is a, c, g, or t
  misc_feature (225)..(225): n is a, c, g, or t
  misc_feature (228)..(228): n is a, c, g, or t
  misc_feature (234)..(234): n is a, c, g, or t
  misc_feature (237)..(237): n is a, c, g, or t
  misc_feature (240)..(240): n is a, c, g, or t
  misc_feature (243)..(243): n is a, c, g, or t
  misc_feature (249)..(249): n is a, c, g, or t
  misc_feature (255)..(255): n is a, c, g, or t
  misc_feature (264)..(264): n is a, c, g, or t
  misc_feature (267)..(267): n is a, c, g, or t
  misc_feature (270)..(270): n is a, c, g, or t
  misc_feature (276)..(276): n is a, c, g, or t
  misc_feature (288)..(288): n is a, c, g, or t
  misc_feature (303)..(303): n is a, c, g, or t
  misc_feature (306)..(306): n is a, c, g, or t
  misc_feature (309)..(309): n is a, c, g, or t
  misc_feature (318)..(318): n is a, c, g, or t
  misc_feature (321)..(321): n is a, c, g, or t
  misc_feature (327)..(327): n is a, c, g, or t
  misc_feature (333)..(333): n is a, c, g, or t
  misc_feature (342)..(342): n is a, c, g, or t
  misc_feature (348)..(348): n is a, c, g, or t
  misc_feature (357)..(357): n is a, c, g, or t
  misc_feature (360)..(360): n is a, c, g, or t
  misc_feature (363)..(363): n is a, c, g, or t
  misc_feature (369)..(369): n is a, c, g, or t
  misc_feature (372)..(372): n is a, c, g, or t
  misc_feature (375)..(375): n is a, c, g, or t
  misc_feature (381)..(381): n is a, c, g, or t
  misc_feature (387)..(387): n is a, c, g, or t
  misc_feature (390)..(390): n is a, c, g, or t
  misc_feature (393)..(393): n is a, c, g, or t
  misc_feature (396)..(396): n is a, c, g, or t
  misc_feature (399)..(399): n is a, c, g, or t
  misc_feature (402)..(402): n is a, c, g, or t
  misc_feature (405)..(405): n is a, c, g, or t
  misc_feature (408)..(408): n is a, c, g, or t
  misc_feature (411)..(411): n is a, c, g, or t
  misc_feature (423)..(423): n is a, c, g, or t
  misc_feature (429)..(429): n is a, c, g, or t
  misc_feature (432)..(432): n is a, c, g, or t
  misc_feature (435)..(435): n is a, c, g, or t
  misc_feature (441)..(441): n is a, c, g, or t
  misc_feature (444)..(444): n is a, c, g, or t
  misc_feature (450)..(450): n is a, c, g, or t
  misc_feature (459)..(459): n is a, c, g, or t
  misc_feature (471)..(471): n is a, c, g, or t
  misc_feature (474)..(474): n is a, c, g, or t
  misc_feature (477)..(477): n is a, c, g, or t
  misc_feature (486)..(486): n is a, c, g, or t
  misc_feature (495)..(495): n is a, c, g, or t
  misc_feature (498)..(498): n is a, c, g, or t
  misc_feature (507)..(507): n is a, c, g, or t
  misc_feature (510)..(510): n is a, c, g, or t
  misc_feature (516)..(516): n is a, c, g, or t
  misc_feature (519)..(519): n is a, c, g, or t
  misc_feature (522)..(522): n is a, c, g, or t
  misc_feature (528)..(528): n is a, c, g, or t
  misc_feature (537)..(537): n is a, c, g, or t
  misc_feature (540)..(540): n is a, c, g, or t
  misc_feature (543)..(543): n is a, c, g, or t
  misc_feature (546)..(546): n is a, c, g, or t
  misc_feature (549)..(549): n is a, c, g, or t
  misc_feature (552)..(552): n is a, c, g, or t
  misc_feature (561)..(561): n is a, c, g, or t
  misc_feature (567)..(567): n is a, c, g, or t
  misc_feature (570)..(570): n is a, c, g, or t
  misc_feature (576)..(576): n is a, c, g, or t
  misc_feature (585)..(585): n is a, c, g, or t
  misc_feature (588)..(588): n is a, c, g, or t
  misc_feature (591)..(591): n is a, c, g, or t
  misc_feature (597)..(597): n is a, c, g, or t
  misc_feature (600)..(600): n is a, c, g, or t
  misc_feature (606)..(606): n is a, c, g, or t
  misc_feature (609)..(609): n is a, c, g, or t
  misc_feature (612)..(612): n is a, c, g, or t
  misc_feature (615)..(615): n is a, c, g, or t
  misc_feature (618)..(618): n is a, c, g, or t
  misc_feature (627)..(627): n is a, c, g, or t
  misc_feature (630)..(630): n is a, c, g, or t
  misc_feature (636)..(636): n is a, c, g, or t
  misc_feature (642)..(642): n is a, c, g, or t
  misc_feature (645)..(645): n is a, c, g, or t
  misc_feature (651)..(651): n is a, c, g, or t
  misc_feature (663)..(663): n is a, c, g, or t
  misc_feature (666)..(666): n is a, c, g, or t
  misc_feature (675)..(675): n is a, c, g, or t
  misc_feature (678)..(678): n is a, c, g, or t
  misc_feature (681)..(681): n is a, c, g, or t
  misc_feature (684)..(684): n is a, c, g, or t
  misc_feature (687)..(687): n is a, c, g, or t
  misc_feature (693)..(693): n is a, c, g, or t
  misc_feature (696)..(696): n is a, c, g, or t
  misc_feature (699)..(699): n is a, c, g, or t
  misc_feature (702)..(702): n is a, c, g, or t
  misc_feature (705)..(705): n is a, c, g, or t
  misc_feature (708)..(708): n is a, c, g, or t
  misc_feature (714)..(714): n is a, c, g, or t
  misc_feature (717)..(717): n is a, c, g, or t
  misc_feature (720)..(720): n is a, c, g, or t
  misc_feature (726)..(726): n is a, c, g, or t
  misc_feature (732)..(732): n is a, c, g, or t
  misc_feature (735)..(735): n is a, c, g, or t
  misc_feature (738)..(738): n is a, c, g, or t
  misc_feature (744)..(744): n is a, c, g, or t
  misc_feature (747)..(747): n is a, c, g, or t
  misc_feature (753)..(753): n is a, c, g, or t
  misc_feature (762)..(762): n is a, c, g, or t
  misc_feature (768)..(768): n is a, c, g, or t
  misc_feature (771)..(771): n is a, c, g, or t
  misc_feature (774)..(774): n is a, c, g, or t
  misc_feature (780)..(780): n is a, c, g, or t
  misc_feature (786)..(786): n is a, c, g, or t
  misc_feature (792)..(792): n is a, c, g, or t
  misc_feature (795)..(795): n is a, c, g, or t
  misc_feature (798)..(798): n is a, c, g, or t
  misc_feature (801)..(801): n is a, c, g, or t
  misc_feature (804)..(804): n is a, c, g, or t
  misc_feature (810)..(810): n is a, c, g, or t
  misc_feature (813)..(813): n is a, c, g, or t
  misc_feature (819)..(819): n is a, c, g, or t
  misc_feature (822)..(822): n is a, c, g, or t
  misc_feature (825)..(825): n is a, c, g, or t
  misc_feature (828)..(828): n is a, c, g, or t
  misc_feature (831)..(831): n is a, c, g, or t
  misc_feature (834)..(834): n is a, c, g, or t
  misc_feature (840)..(840): n is a, c, g, or t
  misc_feature (843)..(843): n is a, c, g, or t
  misc_feature (846)..(846): n is a, c, g, or t
  misc_feature (852)..(852): n is a, c, g, or t
  misc_feature (855)..(855): n is a, c, g, or t
  misc_feature (858)..(858): n is a, c, g, or t
  misc_feature (861)..(861): n is a, c, g, or t
  misc_feature (864)..(864): n is a, c, g, or t
  misc_feature (867)..(867): n is a, c, g, or t
  misc_feature (879)..(879): n is a, c, g, or t
  misc_feature (882)..(882): n is a, c, g, or t
  misc_feature (888)..(888): n is a, c, g, or t
  misc_feature (897)..(897): n is a, c, g, or t
  misc_feature (900)..(900): n is a, c, g, or t
  misc_feature (927)..(927): n is a, c, g, or t
  misc_feature (930)..(930): n is a, c, g, or t
  misc_feature (933)..(933): n is a, c, g, or t
  misc_feature (939)..(939): n is a, c, g, or t
  misc_feature (954)..(954): n is a, c, g, or t
  misc_feature (957)..(957): n is a, c, g, or t
  misc_feature (960)..(960): n is a, c, g, or t
  misc_feature (963)..(963): n is a, c, g, or t
  misc_feature (972)..(972): n is a, c, g, or t
  misc_feature (975)..(975): n is a, c, g, or t
  misc_feature (981)..(981): n is a, c, g, or t
  misc_feature (987)..(987): n is a, c, g, or t
  misc_feature (1020)..(1020): n is a, c, g, or t
  misc_feature (1026)..(1026): n is a, c, g, or t
  misc_feature (1029)..(1029): n is a, c, g, or t
  misc_feature (1032)..(1032): n is a, c, g, or t
  misc_feature (1038)..(1038): n is a, c, g, or t
  misc_feature (1041)..(1041): n is a, c, g, or t
  misc_feature (1050)..(1050): n is a, c, g, or t
  misc_feature (1053)..(1053): n is a, c, g, or t
  misc_feature (1068)..(1068): n is a, c, g, or t
  misc_feature (1071)..(1071): n is a, c, g, or t
  misc_feature (1080)..(1080): n is a, c, g, or t
  misc_feature (1095)..(1095): n is a, c, g, or t
  misc_feature (1098)..(1098): n is a, c, g, or t
  misc_feature (1104)..(1104): n is a, c, g, or t
  misc_feature (1107)..(1107): n is a, c, g, or t
  misc_feature (1110)..(1110): n is a, c, g, or t
  misc_feature (1113)..(1113): n is a, c, g, or t
  misc_feature (1116)..(1116): n is a, c, g, or t
  misc_feature (1119)..(1119): n is a, c, g, or t
  misc_feature (1122)..(1122): n is a, c, g, or t
  misc_feature (1125)..(1125): n is a, c, g, or t
  misc_feature (1131)..(1131): n is a, c, g, or t
  misc_feature (1137)..(1137): n is a, c, g, or t
  misc_feature (1140)..(1140): n is a, c, g, or t
  misc_feature (1143)..(1143): n is a, c, g, or t
  misc_feature (1146)..(1146): n is a, c, g, or t
  misc_feature (1164)..(1164): n is a, c, g, or t
  misc_feature (1167)..(1167): n is a, c, g, or t
  misc_feature (1170)..(1170): n is a, c, g, or t
  misc_feature (1173)..(1173): n is a, c, g, or t
  misc_feature (1176)..(1176): n is a, c, g, or t
  misc_feature (1179)..(1179): n is a, c, g, or t
  misc_feature (1182)..(1182): n is a, c, g, or t
  misc_feature (1188)..(1188): n is a, c, g, or t
  misc_feature (1197)..(1197): n is a, c, g, or t
  misc_feature (1206)..(1206): n is a, c, g, or t
  misc_feature (1209)..(1209): n is a, c, g, or t
  misc_feature (1212)..(1212): n is a, c, g, or t
  misc_feature (1218)..(1218): n is a, c, g, or t
  misc_feature (1224)..(1224): n is a, c, g, or t
  misc_feature (1239)..(1239): n is a, c, g, or t
  misc_feature (1242)..(1242): n is a, c, g, or t
  misc_feature (1245)..(1245): n is a, c, g, or t
  misc_feature (1251)..(1251): n is a, c, g, or t
  misc_feature (1254)..(1254): n is a, c, g, or t
  misc_feature (1263)..(1263): n is a, c, g, or t
  misc_feature (1275)..(1275): n is a, c, g, or t
  misc_feature (1278)..(1278): n is a, c, g, or t
  misc_feature (1284)..(1284): n is a, c, g, or t
  misc_feature (1287)..(1287): n is a, c, g, or t
  misc_feature (1293)..(1293): n is a, c, g, or t
  misc_feature (1311)..(1311): n is a, c, g, or t
  misc_feature (1314)..(1314): n is a, c, g, or t
  misc_feature (1320)..(1320): n is a, c, g, or t
  misc_feature (1323)..(1323): n is a, c, g, or t
  misc_feature (1326)..(1326): n is a, c, g, or t
  misc_feature (1329)..(1329): n is a, c, g, or t
  misc_feature (1332)..(1332): n is a, c, g, or t
  misc_feature (1335)..(1335): n is a, c, g, or t
  misc_feature (1338)..(1338): n is a, c, g, or t
  misc_feature (1341)..(1341): n is a, c, g, or t
  misc_feature (1344)..(1344): n is a, c, g, or t
  misc_feature (1347)..(1347): n is a, c, g, or t
  misc_feature (1353)..(1353): n is a, c, g, or t
  misc_feature (1356)..(1356): n is a, c, g, or t
  misc_feature (1359)..(1359): n is a, c, g, or t
  misc_feature (1362)..(1362): n is a, c, g, or t
  misc_feature (1365)..(1365): n is a, c, g, or t
  misc_feature (1368)..(1368): n is a, c, g, or t
  misc_feature (1374)..(1374): n is a, c, g, or t
  misc_feature (1377)..(1377): n is a, c, g, or t
  misc_feature (1383)..(1383): n is a, c, g, or t
  misc_feature (1386)..(1386): n is a, c, g, or t
  misc_feature (1389)..(1389): n is a, c, g, or t
  misc_feature (1392)..(1392): n is a, c, g, or t
  misc_feature (1395)..(1395): n is a, c, g, or t
  misc_feature (1401)..(1401): n is a, c, g, or t
  misc_feature (1404)..(1404): n is a, c, g, or t
  misc_feature (1407)..(1407): n is a, c, g, or t
  misc_feature (1416)..(1416): n is a, c, g, or t
  misc_feature (1419)..(1419): n is a, c, g, or t
  misc_feature (1425)..(1425): n is a, c, g, or t
  misc_feature (1428)..(1428): n is a, c, g, or t
  misc_feature (1434)..(1434): n is a, c, g, or t
  misc_feature (1440)..(1440): n is a, c, g, or t
  misc_feature (1443)..(1443): n is a, c, g, or t
  misc_feature (1446)..(1446): n is a, c, g, or t
  misc_feature (1449)..(1449): n is a, c, g, or t
  misc_feature (1455)..(1455): n is a, c, g, or t
  misc_feature (1458)..(1458): n is a, c, g, or t
  misc_feature (1461)..(1461): n is a, c, g, or t
  misc_feature (1467)..(1467): n is a, c, g, or t
  misc_feature (1470)..(1470): n is a, c, g, or t
  misc_feature (1479)..(1479): n is a, c, g, or t
  misc_feature (1482)..(1482): n is a, c, g, or t
  misc_feature (1485)..(1485): n is a, c, g, or t
  misc_feature (1488)..(1488): n is a, c, g, or t
  misc_feature (1491)..(1491): n is a, c, g, or t
  misc_feature (1494)..(1494): n is a, c, g, or t
  misc_feature (1500)..(1500): n is a, c, g, or t
  misc_feature (1503)..(1503): n is a, c, g, or t
  misc_feature (1506)..(1506): n is a, c, g, or t
  misc_feature (1509)..(1509): n is a, c, g, or t
  misc_feature (1512)..(1512): n is a, c, g, or t
  misc_feature (1515)..(1515): n is a, c, g, or t
  misc_feature (1518)..(1518): n is a, c, g, or t
  misc_feature (1521)..(1521): n is a, c, g, or t
  misc_feature (1524)..(1524): n is a, c, g, or t
  misc_feature (1527)..(1527): n is a, c, g, or t
  misc_feature (1530)..(1530): n is a, c, g, or t
  misc_feature (1533)..(1533): n is a, c, g, or t
  misc_feature (1536)..(1536): n is a, c, g, or t
  misc_feature (1539)..(1539): n is a, c, g, or t
  misc_feature (1542)..(1542): n is a, c, g, or t
  misc_feature (1554)..(1554): n is a, c, g, or t
  misc_feature (1557)..(1557): n is a, c, g, or t
  misc_feature (1566)..(1566): n is a, c, g, or t
  misc_feature (1569)..(1569): n is a, c, g, or t
  misc_feature (1572)..(1572): n is a, c, g, or t
  misc_feature (1575)..(1575): n is a, c, g, or t
  misc_feature (1581)..(1581): n is a, c, g, or t
  misc_feature (1584)..(1584): n is a, c, g, or t
  misc_feature (1590)..(1590): n is a, c, g, or t
  misc_feature (1593)..(1593): n is a, c, g, or t
  misc_feature (1596)..(1596): n is a, c, g, or t
  misc_feature (1599)..(1599): n is a, c, g, or t
  misc_feature (1605)..(1605): n is a, c, g, or t
  misc_feature (1611)..(1611): n is a, c, g, or t
  misc_feature (1614)..(1614): n is a, c, g, or t
  misc_feature (1617)..(1617): n is a, c, g, or t
  misc_feature (1620)..(1620): n is a, c, g, or t
  misc_feature (1632)..(1632): n is a, c, g, or t
  misc_feature (1638)..(1638): n is a, c, g, or t
  misc_feature (1641)..(1641): n is a, c, g, or t
  misc_feature (1644)..(1644): n is a, c, g, or t
  misc_feature (1647)..(1647): n is a, c, g, or t
  misc_feature (1650)..(1650): n is a, c, g, or t
  misc_feature (1653)..(1653): n is a, c, g, or t
  misc_feature (1656)..(1656): n is a, c, g, or t
  misc_feature (1659)..(1659): n is a, c, g, or t
  misc_feature (1662)..(1662): n is a, c, g, or t
  misc_feature (1665)..(1665): n is a, c, g, or t
  misc_feature (1671)..(1671): n is a, c, g, or t
  misc_feature (1674)..(1674): n is a, c, g, or t
  misc_feature (1686)..(1686): n is a, c, g, or t
  misc_feature (1689)..(1689): n is a, c, g, or t
  misc_feature (1692)..(1692): n is a, c, g, or t
  misc_feature (1698)..(1698): n is a, c, g, or t
  misc_feature (1701)..(1701): n is a, c, g, or t
  misc_feature (1704)..(1704): n is a, c, g, or t
  misc_feature (1707)..(1707): n is a, c, g, or t
  misc_feature (1713)..(1713): n is a, c, g, or t
  misc_feature (1716)..(1716): n is a, c, g, or t
  misc_feature (1725)..(1725): n is a, c, g, or t
  misc_feature (1728)..(1728): n is a, c, g, or t
  misc_feature (1734)..(1734): n is a, c, g, or t
  misc_feature (1737)..(1737): n is a, c, g, or t
  misc_feature (1740)..(1740): n is a, c, g, or t
  misc_feature (1743)..(1743): n is a, c, g, or t
  misc_feature (1749)..(1749): n is a, c, g, or t
  misc_feature (1752)..(1752): n is a, c, g, or t
  misc_feature (1755)..(1755): n is a, c, g, or t
  misc_feature (1761)..(1761): n is a, c, g, or t
  misc_feature (1767)..(1767): n is a, c, g, or t
  misc_feature (1770)..(1770): n is a, c, g, or t
  misc_feature (1773)..(1773): n is a, c, g, or t
  misc_feature (1776)..(1776): n is a, c, g, or t
  misc_feature (1779)..(1779): n is a, c, g, or t
  misc_feature (1785)..(1785): n is a, c, g, or t
  misc_feature (1794)..(1794): n is a, c, g, or t
  misc_feature (1797)..(1797): n is a, c, g, or t
  misc_feature (1800)..(1800): n is a, c, g, or t
  misc_feature (1806)..(1806): n is a, c, g, or t
  misc_feature (1809)..(1809): n is a, c, g, or t
  misc_feature (1812)..(1812): n is a, c, g, or t
  misc_feature (1815)..(1815): n is a, c, g, or t
  misc_feature (1818)..(1818): n is a, c, g, or t
  misc_feature (1824)..(1824): n is a, c, g, or t
  misc_feature (1830)..(1830): n is a, c, g, or t
  misc_feature (1836)..(1836): n is a, c, g, or t
  misc_feature (1839)..(1839): n is a, c, g, or t
  misc_feature (1842)..(1842): n is a, c, g, or t
  misc_feature (1851)..(1851): n is a, c, g, or t
  misc_feature (1857)..(1857): n is a, c, g, or t
  misc_feature (1866)..(1866): n is a, c, g, or t
  misc_feature (1869)..(1869): n is a, c, g, or t
  misc_feature (1875)..(1875): n is a, c, g, or t
  misc_feature (1878)..(1878): n is a, c, g, or t
atgccnwsntgggcnytnttyatggtnacnwsntgyytnytnytngcnccncaraayytngcncargtnwsnwsncargaygtnwsnytnytngcnwsngaywsngarccnytnaartgyttywsnmgnacnttygargayytnacntgyttytgggaygargargargcngcnccnwsnggnacntaycarytnytntaygcntayccnmgngaraarccnmgngcntgyccnytnwsnwsncarwsnatgccncayttyggnacnmgntaygtntgycarttyccngaycargargargtnmgnytnttyttyccnytncayytntgggtnaaraaygtnttyytnaaycaracnmgnacncarmgngtnytnttygtngaywsngtnggnytnccngcnccnccnwsnathathaargcnatgggnggnwsncarccnggngarytncarathwsntgggargarccngcnccngarathwsngayttyytnmgntaygarytnmgntayggnccnmgngayccnaaraaywsnacnggnccnacngtnathcarytnathgcnacngaracntgytgyccngcnytncarmgnccncaywsngcnwsngcnytngaycarwsnccntgygcncarccnacnatgccntggcargayggnccnaarcaracnwsnccnwsnmgngargcnwsngcnytnacngcngarggnggnwsntgyytnathwsnggnytncarccnggnaaywsntaytggytncarytnmgnwsngarccngayggnathwsnytnggnggnwsntggggnwsntggwsnytnccngtnacngtngayytnccnggngaygcngtngcnytnggnytncartgyttyacnytngayytnaaraaygtnacntgycartggcarcarcargaycaygcnwsnwsncarggnttyttytaycaywsnmgngcnmgntgytgyccnmgngaymgntayccnathtgggaraaytgygargargargaraaracnaayccnggnytncaracnccncarttywsnmgntgycayttyaarwsnmgnaaygaywsnathathcayathytngtngargtnacnacngcnccnggnacngtncaywsntayytnggnwsnccnttytggathcaycargcngtnmgnytnccnacnccnaayytncaytggmgngarathwsnwsnggncayytngarytngartggcarcayccnwsnwsntgggcngcncargaracntgytaycarytnmgntayacnggngarggncaycargaytggaargtnytngarccnccnytnggngcnmgnggnggnacnytngarytnmgnccnmgnwsnmgntaymgnytncarytnmgngcnmgnytnaayggnccnacntaycarggnccntggwsnwsntggwsngayccnacnmgngtngaracngcnacngaracngcntggathwsnytngtnacngcnytncayytngtnytnggnytnwsngcngtnytnggnytnytnytnytnmgntggcarttyccngcncaytaymgnmgnytnmgncaygcnytntggccnwsnytnccngayytncaymgngtnccnmgngaytgggayccncarccnytnggnccnccnacnccnggngtnccngayytngtngayttycarccnccnccngarytngtnytnmgngargcnggngargargtnccngaygcnggnccnmgngarggngtnwsnttyccntggwsnmgnccnccnggncarggngarttymgngcnytnaaygcnmgnytnccnytnaayacngaygcntayytnwsnytncargarytncarggncargayccnacncayytngtntrrtrr

SEQ ID NO: 18 - DNA, 2430 bp, Artificial Sequence
  TpoR.IL2rB-cyt.TpoR-cyt
  misc_feature (6)..(6): n is a, c, g, or t
  misc_feature (9)..(9): n is a, c, g, or t
  misc_feature (15)..(15): n is a, c, g, or t
  misc_feature (18)..(18): n is a, c, g, or t
  misc_feature (27)..(27): n is a, c, g, or t
  misc_feature (30)..(30): n is a, c, g, or t
  misc_feature (33)..(33): n is a, c, g, or t
  misc_feature (39)..(39): n is a, c, g, or t
  misc_feature (42)..(42): n is a, c, g, or t
  misc_feature (45)..(45): n is a, c, g, or t
  misc_feature (48)..(48): n is a, c, g, or t
  misc_feature (51)..(51): n is a, c, g, or t
  misc_feature (60)..(60): n is a, c, g, or t
  misc_feature (63)..(63): n is a, c, g, or t
  misc_feature (69)..(69): n is a, c, g, or t
  misc_feature (72)..(72): n is a, c, g, or t
  misc_feature (75)..(75): n is a, c, g, or t
  misc_feature (84)..(84): n is a, c, g, or t
  misc_feature (87)..(87): n is a, c, g, or t
  misc_feature (90)..(90): n is a, c, g, or t
  misc_feature (93)..(93): n is a, c, g, or t
  misc_feature (96)..(96): n is a, c, g, or t
  misc_feature (99)..(99): n is a, c, g, or t
  misc_feature (105)..(105): n is a, c, g, or t
  misc_feature (111)..(111): n is a, c, g, or t
  misc_feature (114)..(114): n is a, c, g, or t
  misc_feature (126)..(126): n is a, c, g, or t
  misc_feature (129)..(129): n is a, c, g, or t
  misc_feature (132)..(132): n is a, c, g, or t
  misc_feature (144)..(144): n is a, c, g, or t
  misc_feature (147)..(147): n is a, c, g, or t
  misc_feature (171)..(171): n is a, c, g, or t
  misc_feature (174)..(174): n is a, c, g, or t
  misc_feature (177)..(177): n is a, c, g, or t
  misc_feature (180)..(180): n is a, c, g, or t
  misc_feature (183)..(183): n is a, c, g, or t
  misc_feature (186)..(186): n is a, c, g, or t
  misc_feature (195)..(195): n is a, c, g, or t
  misc_feature (198)..(198): n is a, c, g, or t
  misc_feature (204)..(204): n is a, c, g, or t
  misc_feature (210)..(210): n is a, c, g, or t
  misc_feature (213)..(213): n is a, c, g, or t
  misc_feature (222)..(222): n is a, c, g, or t
  misc_feature (225)..(225): n is a, c, g, or t
  misc_feature (228)..(228): n is a, c, g, or t
  misc_feature (234)..(234): n is a, c, g, or t
  misc_feature (237)..(237): n is a, c, g, or t
  misc_feature (240)..(240): n is a, c, g, or t
  misc_feature (243)..(243): n is a, c, g, or t
  misc_feature (249)..(249): n is a, c, g, or t
  misc_feature (255)..(255): n is a, c, g, or t
  misc_feature (264)..(264): n is a, c, g, or t
  misc_feature (267)..(267): n is a, c, g, or t
  misc_feature (270)..(270): n is a, c, g, or t
  misc_feature (276)..(276): n is a, c, g, or t
  misc_feature (288)..(288): n is a, c, g, or t
  misc_feature (303)..(303): n is a, c, g, or t
  misc_feature (306)..(306): n is a, c, g, or t
  misc_feature (309)..(309): n is a, c, g, or t
  misc_feature (318)..(318): n is a, c, g, or t
  misc_feature (321)..(321): n is a, c, g, or t
  misc_feature (327)..(327): n is a, c, g, or t
  misc_feature (333)..(333): n is a, c, g, or t
  misc_feature (342)..(342): n is a, c, g, or t
  misc_feature (348)..(348): n is a, c, g, or t
  misc_feature (357)..(357): n is a, c, g, or t
  misc_feature (360)..(360): n is a, c, g, or t
  misc_feature (363)..(363): n is a, c, g, or t
  misc_feature (369)..(369): n is a, c, g, or t
  misc_feature (372)..(372): n is a, c, g, or t
  misc_feature (375)..(375): n is a, c, g, or t
  misc_feature (381)..(381): n is a, c, g, or t
  misc_feature (387)..(387): n is a, c, g, or t
  misc_feature (390)..(390): n is a, c, g, or t
  misc_feature (393)..(393): n is a, c, g, or t
  misc_feature (396)..(396): n is a, c, g, or t
  misc_feature (399)..(399): n is a, c, g, or t
  misc_feature (402)..(402): n is a, c, g, or t
  misc_feature (405)..(405): n is a, c, g, or t
  misc_feature (408)..(408): n is a, c, g, or t
  misc_feature (411)..(411): n is a, c, g, or t
  misc_feature (423)..(423): n is a, c, g, or t
  misc_feature (429)..(429): n is a, c, g, or t
  misc_feature (432)..(432): n is a, c, g, or t
  misc_feature (435)..(435): n is a, c, g, or t
  misc_feature (441)..(441): n is a, c, g, or t
  misc_feature (444)..(444): n is a, c, g, or t
  misc_feature (450)..(450): n is a, c, g, or t
  misc_feature (459)..(459): n is a, c, g, or t
  misc_feature (471)..(471): n is a, c, g, or t
  misc_feature (474)..(474): n is a, c, g, or t
  misc_feature (477)..(477): n is a, c, g, or t
  misc_feature (486)..(486): n is a, c, g, or t
  misc_feature (495)..(495): n is a, c, g, or t
  misc_feature (498)..(498): n is a, c, g, or t
  misc_feature (507)..(507): n is a, c, g, or t
  misc_feature (510)..(510): n is a, c, g, or t
  misc_feature (516)..(516): n is a, c, g, or t
  misc_feature (519)..(519): n is a, c, g, or t
  misc_feature (522)..(522): n is a, c, g, or t
  misc_feature (528)..(528): n is a, c, g, or t
  misc_feature (537)..(537): n is a, c, g, or t
  misc_feature (540)..(540): n is a, c, g, or t
  misc_feature (543)..(543): n is a, c, g, or t
  misc_feature (546)..(546): n is a, c, g, or t
  misc_feature (549)..(549): n is a, c, g, or t
  misc_feature (552)..(552): n is a, c, g, or t
  misc_feature (561)..(561): n is a, c, g, or t
  misc_feature (567)..(567): n is a, c, g, or t
  misc_feature (570)..(570): n is a, c, g, or t
  misc_feature (576)..(576): n is a, c, g, or t
  misc_feature (585)..(585): n is a, c, g, or t
  misc_feature (588)..(588): n is a, c, g, or t
  misc_feature (591)..(591): n is a, c, g, or t
  misc_feature (597)..(597): n is a, c, g, or t
  misc_feature (600)..(600): n is a, c, g, or t
  misc_feature (606)..(606): n is a, c, g, or t
  misc_feature (609)..(609): n is a, c, g, or t
  misc_feature (612)..(612): n is a, c, g, or t
  misc_feature (615)..(615): n is a, c, g, or t
  misc_feature (618)..(618): n is a, c, g, or t
  misc_feature (627)..(627): n is a, c, g, or t
  misc_feature (630)..(630): n is a, c, g, or t
  misc_feature (636)..(636): n is a, c, g, or t
  misc_feature (642)..(642): n is a, c, g, or t
  misc_feature (645)..(645): n is a, c, g, or t
  misc_feature (651)..(651): n is a, c, g, or t
  misc_feature (663)..(663): n is a, c, g, or t
  misc_feature (666)..(666): n is a, c, g, or t
  misc_feature (675)..(675): n is a, c, g, or t
  misc_feature (678)..(678): n is a, c, g, or t
  misc_feature (681)..(681): n is a, c, g, or t
  misc_feature (684)..(684): n is a, c, g, or t
  misc_feature (687)..(687): n is a, c, g, or t
  misc_feature (693)..(693): n is a, c, g, or t
  misc_feature (696)..(696): n is a, c, g, or t
  misc_feature (699)..(699): n is a, c, g, or t
  misc_feature (702)..(702): n is a, c, g, or t
  misc_feature (705)..(705): n is a, c, g, or t
  misc_feature (708)..(708): n is a, c, g, or t
  misc_feature (714)..(714): n is a, c, g, or t
  misc_feature (717)..(717): n is a, c, g, or t
  misc_feature (720)..(720): n is a, c, g, or t
  misc_feature (726)..(726): n is a, c, g, or t
  misc_feature (732)..(732): n is a, c, g, or t
  misc_feature (735)..(735): n is a, c, g, or t
  misc_feature (738)..(738): n is a, c, g, or t
  misc_feature (744)..(744): n is a, c, g, or t
  misc_feature (747)..(747): n is a, c, g, or t
  misc_feature (753)..(753): n is a, c, g, or t
  misc_feature (762)..(762): n is a, c, g, or t
  misc_feature (768)..(768): n is a, c, g, or t
  misc_feature (771)..(771): n is a, c, g, or t
  misc_feature (774)..(774): n is a, c, g, or t
  misc_feature (780)..(780): n is a, c, g, or t
  misc_feature (786)..(786): n is a, c, g, or t
  misc_feature (792)..(792): n is a, c, g, or t
  misc_feature (795)..(795): n is a, c, g, or t
  misc_feature (798)..(798): n is a, c, g, or t
  misc_feature (801)..(801): n is a, c, g, or t
  misc_feature (804)..(804): n is a, c, g, or t
  misc_feature (810)..(810): n is a, c, g, or t
  misc_feature (813)..(813): n is a, c, g, or t
  misc_feature (819)..(819): n is a, c, g, or t
  misc_feature (822)..(822): n is a, c, g, or t
  misc_feature (825)..(825): n is a, c, g, or t
  misc_feature (828)..(828): n is a, c, g, or t
  misc_feature (831)..(831): n is a, c, g, or t
  misc_feature (834)..(834): n is a, c, g, or t
  misc_feature (840)..(840): n is a, c, g, or t
  misc_feature (843)..(843): n is a, c, g, or t
  misc_feature (846)..(846): n is a, c, g, or t
  misc_feature (852)..(852): n is a, c, g, or t
  misc_feature (855)..(855): n is a, c, g, or t
  misc_feature (858)..(858): n is a, c, g, or t
  misc_feature (861)..(861): n is a, c, g, or t
  misc_feature (864)..(864): n is a, c, g, or t
  misc_feature (867)..(867): n is a, c, g, or t
  misc_feature (879)..(879): n is a, c, g, or t
  misc_feature (882)..(882): n is a, c, g, or t
  misc_feature (888)..(888): n is a, c, g, or t
  misc_feature (897)..(897): n is a, c, g, or t
  misc_feature (900)..(900): n is a, c, g, or t
  misc_feature (927)..(927): n is a, c, g, or t
  misc_feature (930)..(930): n is a, c, g, or t
  misc_feature (933)..(933): n is a, c, g, or t
  misc_feature (939)..(939): n is a, c, g, or t
  misc_feature (954)..(954): n is a, c, g, or t
  misc_feature (957)..(957): n is a, c, g, or t
  misc_feature (960)..(960): n is a, c, g, or t
  misc_feature (963)..(963): n is a, c, g, or t
  misc_feature (972)..(972): n is a, c, g, or t
  misc_feature (975)..(975): n is a, c, g, or t
  misc_feature (981)..(981): n is a, c, g, or t
  misc_feature (987)..(987): n is a, c, g, or t
  misc_feature (1020)..(1020): n is a, c, g, or t
  misc_feature (1026)..(1026): n is a, c, g, or t
  misc_feature (1029)..(1029): n is a, c, g, or t
  misc_feature (1032)..(1032): n is a, c, g, or t
  misc_feature (1038)..(1038): n is a, c, g, or t
  misc_feature (1041)..(1041): n is a, c, g, or t
  misc_feature (1050)..(1050): n is a, c, g, or t
  misc_feature (1053)..(1053): n is a, c, g, or t
  misc_feature (1068)..(1068): n is a, c, g, or t
  misc_feature (1071)..(1071): n is a, c, g, or t
  misc_feature (1080)..(1080): n is a, c, g, or t
  misc_feature (1095)..(1095): n is a, c, g, or t
  misc_feature (1098)..(1098): n is a, c, g, or t
  misc_feature (1104)..(1104): n is a, c, g, or t
  misc_feature (1107)..(1107): n is a, c, g, or t
  misc_feature (1110)..(1110): n is a, c, g, or t
  misc_feature (1113)..(1113): n is a, c, g, or t
  misc_feature (1116)..(1116): n is a, c, g, or t
  misc_feature (1119)..(1119): n is a, c, g, or t
  misc_feature (1122)..(1122): n is a, c, g, or t
  misc_feature (1125)..(1125): n is a, c, g, or t
  misc_feature (1131)..(1131): n is a, c, g, or t
  misc_feature (1137)..(1137): n is a, c, g, or t
  misc_feature (1140)..(1140): n is a, c, g, or t
  misc_feature (1143)..(1143): n is a, c, g, or t
  misc_feature (1146)..(1146): n is a, c, g, or t
  misc_feature (1164)..(1164): n is a, c, g, or t
  misc_feature (1167)..(1167): n is a, c, g, or t
  misc_feature (1170)..(1170): n is a, c, g, or t
  misc_feature (1173)..(1173): n is a, c, g, or t
  misc_feature (1176)..(1176): n is a, c, g, or t
  misc_feature (1179)..(1179): n is a, c, g, or t
  misc_feature (1182)..(1182): n is a, c, g, or t
  misc_feature (1188)..(1188): n is a, c, g, or t
  misc_feature (1197)..(1197): n is a, c, g, or t
  misc_feature (1206)..(1206): n is a, c, g, or t
  misc_feature (1209)..(1209): n is a, c, g, or t
  misc_feature (1212)..(1212): n is a, c, g, or t
  misc_feature (1218)..(1218): n is a, c, g, or t
  misc_feature (1224)..(1224): n is a, c, g, or t
  misc_feature (1239)..(1239): n is a, c, g, or t
  misc_feature (1242)..(1242): n is a, c, g, or t
  misc_feature (1245)..(1245): n is a, c, g, or t
  misc_feature (1251)..(1251): n is a, c, g, or t
  misc_feature (1254)..(1254): n is a, c, g, or t
  misc_feature (1263)..(1263): n is a, c, g, or t
  misc_feature (1275)..(1275): n is a, c, g, or t
  misc_feature (1278)..(1278): n is a, c, g, or t
  misc_feature (1284)..(1284): n is a, c, g, or t
  misc_feature (1287)..(1287): n is a, c, g, or t
  misc_feature (1293)..(1293): n is a, c, g, or t
  misc_feature (1311)..(1311): n is a, c, g, or t
  misc_feature (1314)..(1314): n is a, c, g, or t
  misc_feature (1320)..(1320): n is a, c, g, or t
  misc_feature (1323)..(1323): n is a, c, g, or t
  misc_feature (1326)..(1326): n is a, c, g, or t
  misc_feature (1329)..(1329): n is a, c, g, or t
  misc_feature (1332)..(1332): n is a, c, g, or t
  misc_feature (1335)..(1335): n is a, c, g, or t
  misc_feature (1338)..(1338): n is a, c, g, or t
  misc_feature (1341)..(1341): n is a, c, g, or t
  misc_feature (1344)..(1344): n is a, c, g, or t
  misc_feature (1347)..(1347): n is a, c, g, or t
  misc_feature (1353)..(1353): n is a, c, g, or t
  misc_feature (1356)..(1356): n is a, c, g, or t
  misc_feature (1359)..(1359): n is a, c, g, or t
  misc_feature (1362)..(1362): n is a, c, g, or t
  misc_feature (1365)..(1365): n is a, c, g, or t
  misc_feature (1368)..(1368): n is a, c, g, or t
  misc_feature (1374)..(1374): n is a, c, g, or t
  misc_feature (1377)..(1377): n is a, c, g, or t
  misc_feature (1383)..(1383): n is a, c, g, or t
  misc_feature (1386)..(1386): n is a, c, g, or t
  misc_feature (1389)..(1389): n is a, c, g, or t
  misc_feature (1392)..(1392): n is a, c, g, or t
  misc_feature (1395)..(1395): n is a, c, g, or t
  misc_feature (1401)..(1401): n is a, c, g, or t
  misc_feature (1404)..(1404): n is a, c, g, or t
  misc_feature (1407)..(1407): n is a, c, g, or t
  misc_feature (1416)..(1416): n is a, c, g, or t
  misc_feature (1419)..(1419): n is a, c, g, or t
  misc_feature (1425)..(1425): n is a, c, g, or t
  misc_feature (1428)..(1428): n is a, c, g, or t
  misc_feature (1434)..(1434): n is a, c, g, or t
  misc_feature (1440)..(1440): n is a, c, g, or t
  misc_feature (1443)..(1443): n is a, c, g, or t
  misc_feature (1446)..(1446): n is a, c, g, or t
  misc_feature (1449)..(1449): n is a, c, g, or t
  misc_feature (1455)..(1455): n is a, c, g, or t
  misc_feature (1458)..(1458): n is a, c, g, or t
  misc_feature (1461)..(1461): n is a, c, g, or t
  misc_feature (1467)..(1467): n is a, c, g, or t
  misc_feature (1470)..(1470): n is a, c, g, or t
  misc_feature (1479)..(1479): n is a, c, g, or t
  misc_feature (1482)..(1482): n is a, c, g, or t
  misc_feature (1485)..(1485): n is a, c, g, or t
  misc_feature (1488)..(1488): n is a, c, g, or t
  misc_feature (1491)..(1491): n is a, c, g, or t
  misc_feature (1494)..(1494): n is a, c, g, or t
  misc_feature (1500)..(1500): n is a, c, g, or t
  misc_feature (1503)..(1503): n is a, c, g, or t
  misc_feature (1506)..(1506): n is a, c, g, or t
  misc_feature (1509)..(1509): n is a, c, g, or t
  misc_feature (1512)..(1512): n is a, c, g, or t
  misc_feature (1515)..(1515): n is a, c, g, or t
  misc_feature (1518)..(1518): n is a, c, g, or t
  misc_feature (1521)..(1521): n is a, c, g, or t
  misc_feature (1524)..(1524): n is a, c, g, or t
  misc_feature (1527)..(1527): n is a, c, g, or t
  misc_feature (1530)..(1530): n is a, c, g, or t
  misc_feature (1533)..(1533): n is a, c, g, or t
  misc_feature (1536)..(1536): n is a, c, g, or t
  misc_feature (1539)..(1539): n is a, c, g, or t
  misc_feature (1548)..(1548): n is a, c, g, or t
  misc_feature (1554)..(1554): n is a, c, g, or t
  misc_feature (1557)..(1557): n is a, c, g, or t
  misc_feature (1560)..(1560): n is a, c, g, or t
  misc_feature (1566)..(1566): n is a, c, g, or t
  misc_feature (1575)..(1575): n is a, c, g, or t
  misc_feature (1578)..(1578): n is a, c, g, or t
  misc_feature (1590)..(1590): n is a, c, g, or t
  misc_feature (1593)..(1593): n is a, c, g, or t
  misc_feature (1599)..(1599): n is a, c, g, or t
  misc_feature (1602)..(1602): n is a, c, g, or t
  misc_feature (1614)..(1614): n is a, c, g, or t
  misc_feature (1620)..(1620): n is a, c, g, or t
  misc_feature (1623)..(1623): n is a, c, g, or t
  misc_feature (1626)..(1626): n is a, c, g, or t
  misc_feature (1635)..(1635): n is a, c, g, or t
  misc_feature (1638)..(1638): n is a, c, g, or t
  misc_feature (1644)..(1644): n is a, c, g, or t
  misc_feature (1656)..(1656): n is a, c, g, or t
  misc_feature (1659)..(1659): n is a, c, g, or t
  misc_feature (1662)..(1662): n is a, c, g, or t
  misc_feature (1665)..(1665): n is a, c, g, or t
  misc_feature (1671)..(1671): n is a, c, g, or t
  misc_feature (1674)..(1674): n is a, c, g, or t
  misc_feature (1677)..(1677): n is a, c, g, or t
  misc_feature (1680)..(1680): n is a, c, g, or t
  misc_feature (1686)..(1686): n is a, c, g, or t
  misc_feature (1689)..(1689): n is a, c, g, or t
  misc_feature (1692)..(1692): n is a, c, g, or t
  misc_feature (1695)..(1695): n is a, c, g, or t
  misc_feature (1698)..(1698): n is a, c, g, or t
  misc_feature (1701)..(1701): n is a, c, g, or t
  misc_feature (1704)..(1704): n is a, c, g, or t
  misc_feature (1713)..(1713): n is a, c, g, or t
  misc_feature (1716)..(1716): n is a, c, g, or t
  misc_feature (1719)..(1719): n is a, c, g, or t
  misc_feature (1725)..(1725): n is a, c, g, or t
  misc_feature (1728)..(1728): n is a, c, g, or t
  misc_feature (1734)..(1734): n is a, c, g, or t
  misc_feature (1743)..(1743): n is a, c, g, or t
  misc_feature (1746)..(1746): n is a, c, g, or t
  misc_feature (1752)..(1752): n is a, c, g, or t
  misc_feature (1755)..(1755): n is a, c, g, or t
  misc_feature (1758)..(1758): n is a, c, g, or t
  misc_feature (1773)..(1773): n is a, c, g, or t
  misc_feature (1776)..(1776): n is a, c, g, or t
  misc_feature (1782)..(1782): n is a, c, g, or t
  misc_feature (1785)..(1785): n is a, c, g, or t
  misc_feature (1788)..(1788): n is a, c, g, or t
  misc_feature (1791)..(1791): n is a, c, g, or t
  misc_feature (1794)..(1794): n is a, c, g, or t
  misc_feature (1797)..(1797): n is a, c, g, or t
  misc_feature (1806)..(1806): n is a, c, g, or t
  misc_feature (1809)..(1809): n is a, c, g, or t
  misc_feature (1812)..(1812): n is a, c, g, or t
  misc_feature (1815)..(1815): n is a, c, g, or t
  misc_feature (1824)..(1824): n is a, c, g, or t
  misc_feature (1833)..(1833): n is a, c, g, or t
  misc_feature (1851)..(1851): n is a, c, g, or t
  misc_feature (1854)..(1854): n is a, c, g, or t
  misc_feature (1860)..(1860): n is a, c, g, or t
  misc_feature (1863)..(1863): n is a, c, g, or t
  misc_feature (1875)..(1875): n is a, c, g, or t
  misc_feature (1884)..(1884): n is a, c, g, or t
  misc_feature (1893)..(1893): n is a, c, g, or t
  misc_feature (1902)..(1902): n is a, c, g, or t
  misc_feature (1908)..(1908): n is a, c, g, or t
  misc_feature (1920)..(1920): n is a, c, g, or t
  misc_feature (1929)..(1929): n is a, c, g, or t
  misc_feature (1932)..(1932): n is a, c, g, or t
  misc_feature (1935)..(1935): n is a, c, g, or t
  misc_feature (1938)..(1938): n is a, c, g, or t
  misc_feature (1941)..(1941): n is a, c, g, or t
  misc_feature (1944)..(1944): n is a, c, g, or t
  misc_feature (1947)..(1947): n is a, c, g, or t
  misc_feature (1950)..(1950): n is a, c, g, or t
  misc_feature (1953)..(1953): n is a, c, g, or t
  misc_feature (1956)..(1956): n is a, c, g, or t
  misc_feature (1959)..(1959): n is a, c, g, or t
  misc_feature (1965)..(1965): n is a, c, g, or t
  misc_feature (1968)..(1968): n is a, c, g, or t
  misc_feature (1974)..(1974): n is a, c, g, or t
  misc_feature (1977)..(1977): n is a, c, g, or t
  misc_feature (1980)..(1980): n is a, c, g, or t
  misc_feature (1983)..(1983): n is a, c, g, or t
  misc_feature (1995)..(1995): n is a, c, g, or t
  misc_feature (2004)..(2004): n is a, c, g, or t
  misc_feature (2010)..(2010): n is a, c, g, or t
  misc_feature (2013)..(2013): n is a, c, g, or t
  misc_feature (2016)..(2016): n is a, c, g, or t
  misc_feature (2025)..(2025): n is a, c, g, or t
  misc_feature (2028)..(2028): n is a, c, g, or t
  misc_feature (2031)..(2031): n is a, c, g, or t
  misc_feature (2037)..(2037): n is a, c, g, or t
  misc_feature (2040)..(2040): n is a, c, g, or t
  misc_feature (2043)..(2043): n is a, c, g, or t
  misc_feature (2046)..(2046): n is a, c, g, or t
  misc_feature (2049)..(2049): n is a, c, g, or t
  misc_feature (2052)..(2052): n is a, c, g, or t
  misc_feature (2055)..(2055): n is a, c, g, or t
  misc_feature (2058)..(2058): n is a, c, g, or t
  misc_feature (2061)..(2061): n is a, c, g, or t
  misc_feature (2064)..(2064): n is a, c, g, or t
  misc_feature (2067)..(2067): n is a, c, g, or t
  misc_feature (2070)..(2070): n is a, c, g, or t
  misc_feature (2073)..(2073): n is a, c, g, or t
  misc_feature (2076)..(2076): n is a, c, g, or t
  misc_feature (2079)..(2079): n is a, c, g, or t
  misc_feature (2082)..(2082): n is a, c, g, or t
  misc_feature (2085)..(2085): n is a, c, g, or t
  misc_feature (2088)..(2088): n is a, c, g, or t
  misc_feature (2091)..(2091): n is a, c, g, or t
  misc_feature (2094)..(2094): n is a, c, g, or t
  misc_feature (2097)..(2097): n is a, c, g, or t
  misc_feature (2106)..(2106): n is a, c, g, or t
  misc_feature (2112)..(2112): n is a, c, g, or t
  misc_feature (2115)..(2115): n is a, c, g, or t
  misc_feature (2118)..(2118): n is a, c, g, or t
  misc_feature (2121)..(2121): n is a, c, g, or t
  misc_feature (2130)..(2130): n is a, c, g, or t
  misc_feature (2133)..(2133): n is a, c, g, or t
  misc_feature (2136)..(2136): n is a, c, g, or t
  misc_feature (2139)..(2139): n is a, c, g, or t
  misc_feature (2148)..(2148): n is a, c, g, or t
  misc_feature (2151)..(2151): n is a, c, g, or t
  misc_feature (2157)..(2157): n is a, c, g, or t
  misc_feature (2160)..(2160): n is a, c, g, or t
  misc_feature (2163)..(2163): n is a, c, g, or t
  misc_feature (2166)..(2166): n is a, c, g, or t
  misc_feature (2169)..(2169): n is a, c, g, or t
  misc_feature (2172)..(2172): n is a, c, g, or t
  misc_feature (2175)..(2175): n is a, c, g, or t
  misc_feature (2181)..(2181): n is a, c, g, or t
  misc_feature (2184)..(2184): n is a, c, g, or t
  misc_feature (2187)..(2187): n is a, c, g, or t
  misc_feature (2190)..(2190): n is a, c, g, or t
  misc_feature (2196)..(2196): n is a, c, g, or t
  misc_feature (2208)..(2208): n is a, c, g, or t
  misc_feature (2214)..(2214): n is a, c, g, or t
  misc_feature (2217)..(2217): n is a, c, g, or t
  misc_feature (2220)..(2220): n is a, c, g, or t
  misc_feature (2223)..(2223): n is a, c, g, or t
  misc_feature (2232)..(2232): n is a, c, g, or t
  misc_feature (2235)..(2235): n is a, c, g, or t
  misc_feature (2241)..(2241): n is a, c, g, or t
  misc_feature (2244)..(2244): n is a, c, g, or t
  misc_feature (2250)..(2250): n is a, c, g, or t
  misc_feature (2253)..(2253): n is a, c, g, or t
  misc_feature (2256)..(2256): n is a, c, g, or t
  misc_feature (2259)..(2259): n is a, c, g, or t
  misc_feature (2262)..(2262): n is a, c, g, or t
  misc_feature (2265)..(2265): n is a, c, g, or t
  misc_feature (2271)..(2271): n is a, c, g, or t
  misc_feature (2274)..(2274): n is a, c, g, or t
  misc_feature (2280)..(2280): n is a, c, g, or t
  misc_feature (2295)..(2295): n is a, c, g, or t
  misc_feature (2298)..(2298): n is a, c, g, or t
  misc_feature (2301)..(2301): n is a, c, g, or t
  misc_feature (2307)..(2307): n is a, c, g, or t
  misc_feature (2310)..(2310): n is a, c, g, or t
  misc_feature (2316)..(2316): n is a, c, g, or t
  misc_feature (2319)..(2319): n is a, c, g, or t
  misc_feature (2322)..(2322): n is a, c, g, or t
  misc_feature (2328)..(2328): n is a, c, g, or t
  misc_feature (2331)..(2331): n is a, c, g, or t
  misc_feature (2334)..(2334): n is a, c, g, or t
  misc_feature (2337)..(2337): n is a, c, g, or t
  misc_feature (2343)..(2343): n is a, c, g, or t
  misc_feature (2346)..(2346): n is a, c, g, or t
  misc_feature (2352)..(2352): n is a, c, g, or t
  misc_feature (2358)..(2358): n is a, c, g, or t
  misc_feature (2361)..(2361): n is a, c, g, or t
  misc_feature (2364)..(2364): n is a, c, g, or t
  misc_feature (2373)..(2373): n is a, c, g, or t
  misc_feature (2376)..(2376): n is a, c, g, or t
  misc_feature (2385)..(2385): n is a, c, g, or t
  misc_feature (2394)..(2394): n is a, c, g, or t
  misc_feature (2400)..(2400): n is a, c, g, or t
  misc_feature (2403)..(2403): n is a, c, g, or t
  misc_feature (2406)..(2406): n is a, c, g, or t
  misc_feature (2409)..(2409): n is a, c, g, or t
  misc_feature (2424)..(2424): n is a, c, g, or t
atgccnwsntgggcnytnttyatggtnacnwsntgyytnytnytngcnccncaraayytngcncargtnwsnwsncargaygtnwsnytnytngcnwsngaywsngarccnytnaartgyttywsnmgnacnttygargayytnacntgyttytgggaygargargargcngcnccnwsnggnacntaycarytnytntaygcntayccnmgngaraarccnmgngcntgyccnytnwsnwsncarwsnatgccncayttyggnacnmgntaygtntgycarttyccngaycargargargtnmgnytnttyttyccnytncayytntgggtnaaraaygtnttyytnaaycaracnmgnacncarmgngtnytnttygtngaywsngtnggnytnccngcnccnccnwsnathathaargcnatgggnggnwsncarccnggngarytncarathwsntgggargarccngcnccngarathwsngayttyytnmgntaygarytnmgntayggnccnmgngayccnaaraaywsnacnggnccnacngtnathcarytnathgcnacngaracntgytgyccngcnytncarmgnccncaywsngcnwsngcnytngaycarwsnccntgygcncarccnacnatgccntggcargayggnccnaarcaracnwsnccnwsnmgngargcnwsngcnytnacngcngarggnggnwsntgyytnathwsnggnytncarccnggnaaywsntaytggytncarytnmgnwsngarccngayggnathwsnytnggnggnwsntggggnwsntggwsnytnccngtnacngtngayytnccnggngaygcngtngcnytnggnytncartgyttyacnytngayytnaaraaygtnacntgycartggcarcarcargaycaygcnwsnwsncarggnttyttytaycaywsnmgngcnmgntgytgyccnmgngaymgntayccnathtgggaraaytgygargargargaraaracnaayccnggnytncaracnccncarttywsnmgntgycayttyaarwsnmgnaaygaywsnathathcayathytngtngargtnacnacngcnccnggnacngtncaywsntayytnggnwsnccnttytggathcaycargcngtnmgnytnccnacnccnaayytncaytggmgngarathwsnwsnggncayytngarytngartggcarcayccnwsnwsntgggcngcncargaracntgytaycarytnmgntayacnggngarggncaycargaytggaargtnytngarccnccnytnggngcnmgnggnggnacnytngarytnmgnccnmgnwsnmgntaymgnytncarytnmgngcnmgnytnaayggnccnacntaycarggnccntggwsnwsntggwsngayccnacnmgngtngaracngcnacngaracngcntggathwsnytngtnacngcnytncayytngtnytnggnytnwsngcngtnytnggnytnytnytnytnaaytgymgnaayacnggnccntggytnaaraargtnytnaartgyaayacnccngayccnwsnaarttyttywsncarytnwsnwsngarcayggnggngaygtncaraartggytnwsnwsnccnttyccnwsnwsnwsnttywsnccnggnggnytngcnccngarathwsnccnytngargtnytngarmgngayaargtnacncarytnytnytncarcargayaargtnccngarccngcnwsnytnwsnwsnaaycaywsnytnacnwsntgyttyacnaaycarggntayttyttyttycayytnccngaygcnytngarathgargcntgycargtntayttyacntaygayccntaywsngargargayccngaygarggngtngcnggngcnccnacnggnwsnwsnccncarccnytncarccnytnwsnggngargaygaygcntaytgyacnttyccnwsnmgngaygayytnytnytnttywsnccnwsnytnytnggnggnccnwsnccnccnwsnacngcnccnggnggnwsnggngcnggngargarmgnatgccnccnwsnytncargarmgngtnytnggncartayytnmgngayacngcngcnytnwsnccnccnaargcnacngtnwsngayacntgygargargtngarccnwsnytnytngarathytnccnaarwsnwsngarmgnacnccnytnccnytntgywsnwsncargcncaratggaytaymgnmgnytncarccnwsntgyytnggnacnatgccnytnwsngtntgyccnccnatggcngarwsnggnwsntgytgyacnacncayathgcnaaycaywsntayytnccnytnwsntaytggcarcarccntrrtrr

SEQ ID NO: 19 - DNA, 2136 bp, Artificial Sequence
  TpoR.SLAM
  misc_feature (6)..(6): n is a, c, g, or t
  misc_feature (9)..(9): n is a, c, g, or t
  misc_feature (15)..(15): n is a, c, g, or t
  misc_feature (18)..(18): n is a, c, g, or t
  misc_feature (27)..(27): n is a, c, g, or t
  misc_feature (30)..(30): n is a, c, g, or t
  misc_feature (33)..(33): n is a, c, g, or t
  misc_feature (39)..(39): n is a, c, g, or t
  misc_feature (42)..(42): n is a, c, g, or t
  misc_feature (45)..(45): n is a, c, g, or t
  misc_feature (48)..(48): n is a, c, g, or t
  misc_feature (51)..(51): n is a, c, g, or t
  misc_feature (60)..(60): n is a, c, g, or t
  misc_feature (63)..(63): n is a, c, g, or t
  misc_feature (69)..(69): n is a, c, g, or t
  misc_feature (72)..(72): n is a, c, g, or t
  misc_feature (75)..(75): n is a, c, g, or t
  misc_feature (84)..(84): n is a, c, g, or t
  misc_feature (87)..(87): n is a, c, g, or t
  misc_feature (90)..(90): n is a, c, g, or t
  misc_feature (93)..(93): n is a, c, g, or t
  misc_feature (96)..(96): n is a, c, g, or t
  misc_feature (99)..(99): n is a, c, g, or t
  misc_feature (105)..(105): n is a, c, g, or t
  misc_feature (111)..(111): n is a, c, g, or t
  misc_feature (114)..(114): n is a, c, g, or t
  misc_feature (126)..(126): n is a, c, g, or t
  misc_feature (129)..(129): n is a, c, g, or t
  misc_feature (132)..(132): n is a, c, g, or t
  misc_feature (144)..(144): n is a, c, g, or t
  misc_feature (147)..(147): n is a, c, g, or t
  misc_feature (171)..(171): n is a, c, g, or t
  misc_feature (174)..(174): n is a, c, g, or t
  misc_feature (177)..(177): n is a, c, g, or t
  misc_feature (180)..(180): n is a, c, g, or t
  misc_feature (183)..(183): n is a, c, g, or t
  misc_feature (186)..(186): n is a, c, g, or t
  misc_feature (195)..(195): n is a, c, g, or t
  misc_feature (198)..(198): n is a, c, g, or t
  misc_feature (204)..(204): n is a, c, g, or t
  misc_feature (210)..(210): n is a, c, g, or t
  misc_feature (213)..(213): n is a, c, g, or t
  misc_feature (222)..(222): n is a, c, g, or t
  misc_feature (225)..(225): n is a, c, g, or t
  misc_feature (228)..(228): n is a, c, g, or t
  misc_feature (234)..(234): n is a, c, g, or t
  misc_feature (237)..(237): n is a, c, g, or t
  misc_feature (240)..(240): n is a, c, g, or t
  misc_feature (243)..(243): n is a, c, g, or t
  misc_feature (249)..(249): n is a, c, g, or t
  misc_feature (255)..(255): n is a, c, g, or t
  misc_feature (264)..(264): n is a, c, g, or t
  misc_feature (267)..(267): n is a, c, g, or t
  misc_feature (270)..(270): n is a, c, g, or t
  misc_feature (276)..(276): n is a, c, g, or t
  misc_feature (288)..(288): n is a, c, g, or t
  misc_feature (303)..(303): n is a, c, g, or t
  misc_feature (306)..(306): n is a, c, g, or t
  misc_feature (309)..(309): n is a, c, g, or t
  misc_feature (318)..(318): n is a, c, g, or t
  misc_feature (321)..(321): n is a, c, g, or t
  misc_feature (327)..(327): n is a, c, g, or t
  misc_feature (333)..(333): n is a, c, g, or t
  misc_feature (342)..(342): n is a, c, g, or t
  misc_feature (348)..(348): n is a, c, g, or t
  misc_feature (357)..(357): n is a, c, g, or t
  misc_feature (360)..(360): n is a, c, g, or t
  misc_feature (363)..(363): n is a, c, g, or t
  misc_feature (369)..(369): n is a, c, g, or t
  misc_feature (372)..(372): n is a, c, g, or t
  misc_feature (375)..(375): n is a, c, g, or t
  misc_feature (381)..(381): n is a, c, g, or t
  misc_feature (387)..(387): n is a, c, g, or t
  misc_feature (390)..(390): n is a, c, g, or t
  misc_feature (393)..(393): n is a, c, g, or t
  misc_feature (396)..(396): n is a, c, g, or t
  misc_feature (399)..(399): n is a, c, g, or t
  misc_feature (402)..(402): n is a, c, g, or t
  misc_feature (405)..(405): n is a, c, g, or t
  misc_feature (408)..(408): n is a, c, g, or t
  misc_feature (411)..(411): n is a, c, g, or t
  misc_feature (423)..(423): n is a, c, g, or t
  misc_feature (429)..(429): n is a, c, g, or t
  misc_feature (432)..(432): n is a, c, g, or t
  misc_feature (435)..(435): n is a, c, g, or t
  misc_feature (441)..(441): n is a, c, g, or t
  misc_feature (444)..(444): n is a, c, g, or t
  misc_feature (450)..(450): n is a, c, g, or t
  misc_feature (459)..(459): n is a, c, g, or t
  misc_feature (471)..(471): n is a, c, g, or t
  misc_feature (474)..(474): n is a, c, g, or t
  misc_feature (477)..(477): n is a, c, g, or t
  misc_feature (486)..(486): n is a, c, g, or t
  misc_feature (495)..(495): n is a, c, g, or t
  misc_feature (498)..(498): n is a, c, g, or t
  misc_feature (507)..(507): n is a, c, g, or t
  misc_feature (510)..(510): n is a, c, g, or t
  misc_feature (516)..(516): n is a, c, g, or t
  misc_feature (519)..(519): n is a, c, g, or t
  misc_feature (522)..(522): n is a, c, g, or t
  misc_feature (528)..(528): n is a, c, g, or t
  misc_feature (537)..(537): n is a, c, g, or t
  misc_feature (540)..(540): n is a, c, g, or t
  misc_feature (543)..(543): n is a, c, g, or t
  misc_feature (546)..(546): n is a, c, g, or t
  misc_feature (549)..(549): n is a, c, g, or t
  misc_feature (552)..(552): n is a, c, g, or t
  misc_feature (561)..(561): n is a, c, g, or t
  misc_feature (567)..(567): n is a, c, g, or t
  misc_feature (570)..(570): n is a, c, g, or t
  misc_feature (576)..(576): n is a, c, g, or t
  misc_feature (585)..(585): n is a, c, g, or t
  misc_feature (588)..(588): n is a, c, g, or t
  misc_feature (591)..(591): n is a, c, g, or t
  misc_feature (597)..(597): n is a, c, g, or t
  misc_feature (600)..(600): n is a, c, g, or t
  misc_feature (606)..(606): n is a, c, g, or t
  misc_feature (609)..(609): n is a, c, g, or t
  misc_feature (612)..(612): n is a, c, g, or t
  misc_feature (615)..(615): n is a, c, g, or t
  misc_feature (618)..(618): n is a, c, g, or t
  misc_feature (627)..(627): n is a, c, g, or t
  misc_feature (630)..(630): n is a, c, g, or t
  misc_feature (636)..(636): n is a, c, g, or t
  misc_feature (642)..(642): n is a, c, g, or t
  misc_feature (645)..(645): n is a, c, g, or t
  misc_feature (651)..(651): n is a, c, g, or t
  misc_feature (663)..(663): n is a, c, g, or t
  misc_feature (666)..(666): n is a, c, g, or t
  misc_feature (675)..(675): n is a, c, g, or t
  misc_feature (678)..(678): n is a, c, g, or t
  misc_feature (681)..(681): n is a, c, g, or t
  misc_feature (684)..(684): n is a, c, g, or t
  misc_feature (687)..(687): n is a, c, g, or t
  misc_feature (693)..(693): n is a, c, g, or t
  misc_feature (696)..(696): n is a, c, g, or t
  misc_feature (699)..(699): n is a, c, g, or t
  misc_feature (702)..(702): n is a, c, g, or t
  misc_feature (705)..(705): n is a, c, g, or t
  misc_feature (708)..(708): n is a, c, g, or t
  misc_feature (714)..(714): n is a, c, g, or t
  misc_feature (717)..(717): n is a, c, g, or t
  misc_feature (720)..(720): n is a, c, g, or t
  misc_feature (726)..(726): n is a, c, g, or t
  misc_feature (732)..(732): n is a, c, g, or t
  misc_feature (735)..(735): n is a, c, g, or t
  misc_feature (738)..(738): n is a, c, g, or t
  misc_feature (744)..(744): n is a, c, g, or t
  misc_feature (747)..(747): n is a, c, g, or t
  misc_feature (753)..(753): n is a, c, g, or t
  misc_feature (762)..(762): n is a, c, g, or t
  misc_feature (768)..(768): n is a, c, g, or t
  misc_feature (771)..(771): n is a, c, g, or t
  misc_feature (774)..(774): n is a, c, g, or t
  misc_feature (780)..(780): n is a, c, g, or t
  misc_feature (786)..(786): n is a, c, g, or t
  misc_feature (792)..(792): n is a, c, g, or t
  misc_feature (795)..(795): n is a, c, g, or t
  misc_feature (798)..(798): n is a, c, g, or t
  misc_feature (801)..(801): n is a, c, g, or t
  misc_feature (804)..(804): n is a, c, g, or t
  misc_feature (810)..(810): n is a, c, g, or t
  misc_feature (813)..(813): n is a, c, g, or t
  misc_feature (819)..(819): n is a, c, g, or t
  misc_feature (822)..(822): n is a, c, g, or t
  misc_feature (825)..(825): n is a, c, g, or t
  misc_feature (828)..(828): n is a, c, g, or t
  misc_feature (831)..(831): n is a, c, g, or t
  misc_feature (834)..(834): n is a, c, g, or t
  misc_feature (840)..(840): n is a, c, g, or t
  misc_feature (843)..(843): n is a, c, g, or t
  misc_feature (846)..(846): n is a, c, g, or t
  misc_feature (852)..(852): n is a, c, g, or t
  misc_feature (855)..(855): n is a, c, g, or t
  misc_feature (858)..(858): n is a, c, g, or t
  misc_feature (861)..(861): n is a, c, g, or t
  misc_feature (864)..(864): n is a, c, g, or t
  misc_feature (867)..(867): n is a, c, g, or t
  misc_feature (879)..(879): n is a, c, g, or t
  misc_feature (882)..(882): n is a, c, g, or t
  misc_feature (888)..(888): n is a, c, g, or t
  misc_feature (897)..(897): n is a, c, g, or t
  misc_feature (900)..(900): n is a, c, g, or t
  misc_feature (927)..(927): n is a, c, g, or t
  misc_feature (930)..(930): n is a, c, g, or t
  misc_feature (933)..(933): n is a, c, g, or t
  misc_feature (939)..(939): n is a, c, g, or t
  misc_feature (954)..(954): n is a, c, g, or t
  misc_feature (957)..(957): n is a, c, g, or t
  misc_feature (960)..(960): n is a, c, g, or t
  misc_feature (963)..(963): n is a, c, g, or t
  misc_feature (972)..(972): n is a, c, g, or t
  misc_feature (975)..(975): n is a, c, g, or t
  misc_feature (981)..(981): n is a, c, g, or t
  misc_feature (987)..(987): n is a, c, g, or t
  misc_feature (1020)..(1020): n is a, c, g, or t
  misc_feature (1026)..(1026): n is a, c, g, or t
  misc_feature (1029)..(1029): n is a, c, g, or t
  misc_feature (1032)..(1032): n is a, c, g, or t
  misc_feature (1038)..(1038): n is a, c, g, or t
  misc_feature (1041)..(1041): n is a, c, g, or t
  misc_feature (1050)..(1050): n is a, c, g, or t
  misc_feature (1053)..(1053): n is a, c, g, or t
  misc_feature (1068)..(1068): n is a, c, g, or t
  misc_feature (1071)..(1071): n is a, c, g, or t
  misc_feature (1080)..(1080): n is a, c, g, or t
  misc_feature (1095)..(1095): n is a, c, g, or t
  misc_feature (1098)..(1098): n is a, c, g, or t
  misc_feature (1104)..(1104): n is a, c, g, or t
  misc_feature (1107)..(1107): n is a, c, g, or t
  misc_feature (1110)..(1110): n is a, c, g, or t
  misc_feature (1113)..(1113): n is a, c, g, or t
  misc_feature (1116)..(1116): n is a, c, g, or t
  misc_feature (1119)..(1119): n is a, c, g, or t
  misc_feature (1122)..(1122): n is a, c, g, or t
  misc_feature (1125)..(1125): n is a, c, g, or t
  misc_feature (1131)..(1131): n is a, c, g, or t
  misc_feature (1137)..(1137): n is a, c, g, or t
  misc_feature (1140)..(1140): n is a, c, g, or t
  misc_feature (1143)..(1143): n is a, c, g, or t
  misc_feature (1146)..(1146): n is a, c, g, or t
  misc_feature (1164)..(1164): n is a, c, g, or t
  misc_feature (1167)..(1167): n is a, c, g, or t
  misc_feature (1170)..(1170): n is a, c, g, or t
  misc_feature (1173)..(1173): n is a, c, g, or t
  misc_feature (1176)..(1176): n is a, c, g, or t
  misc_feature (1179)..(1179): n is a, c, g, or t
  misc_feature (1182)..(1182): n is a, c, g, or t
  misc_feature (1188)..(1188): n is a, c, g, or t
  misc_feature (1197)..(1197): n is a, c, g, or t
  misc_feature (1206)..(1206): n is a, c, g, or t
  misc_feature (1209)..(1209): n is a, c, g, or t
  misc_feature (1212)..(1212): n is a, c, g, or t
  misc_feature (1218)..(1218): n is a, c, g, or t
  misc_feature (1224)..(1224): n is a, c, g, or t
  misc_feature (1239)..(1239): n is a, c, g, or t
  misc_feature (1242)..(1242): n is a, c, g, or t
  misc_feature (1245)..(1245): n is a, c, g, or t
  misc_feature (1251)..(1251): n is a, c, g, or t
  misc_feature (1254)..(1254): n is a, c, g, or t
  misc_feature (1263)..(1263): n is a, c, g, or t
  misc_feature (1275)..(1275): n is a, c, g, or t
  misc_feature (1278)..(1278): n is a, c, g, or t
  misc_feature (1284)..(1284): n is a, c, g, or t
  misc_feature (1287)..(1287): n is a, c, g, or t
  misc_feature (1293)..(1293): n is a, c, g, or t
  misc_feature (1311)..(1311): n is a, c, g, or t
  misc_feature (1314)..(1314): n is a, c, g, or t
  misc_feature (1320)..(1320): n is a, c, g, or t
  misc_feature (1323)..(1323): n is a, c, g, or t
  misc_feature (1326)..(1326): n is a, c, g, or t
  misc_feature (1329)..(1329): n is a, c, g, or t
  misc_feature (1332)..(1332): n is a, c, g, or t
  misc_feature (1335)..(1335): n is a, c, g, or t
  misc_feature (1338)..(1338): n is a, c, g, or t
  misc_feature (1341)..(1341): n is a, c, g, or t
  misc_feature (1344)..(1344): n is a, c, g, or t
  misc_feature (1347)..(1347): n is a, c, g, or t
  misc_feature (1353)..(1353): n is a, c, g, or t
  misc_feature (1356)..(1356): n is a, c, g, or t
  misc_feature (1359)..(1359): n is a, c, g, or t
  misc_feature (1362)..(1362): n is a, c, g, or t
  misc_feature (1365)..(1365): n is a, c, g, or t
  misc_feature (1368)..(1368): n is a, c, g, or t
  misc_feature (1374)..(1374): n is a, c, g, or t
  misc_feature (1377)..(1377): n is a, c, g, or t
  misc_feature (1383)..(1383): n is a, c, g, or t
  misc_feature (1386)..(1386): n is a, c, g, or t
  misc_feature (1389)..(1389): n is a, c, g, or t
  misc_feature (1392)..(1392): n is a, c, g, or t
  misc_feature (1395)..(1395): n is a, c, g, or t
  misc_feature (1401)..(1401): n is a, c, g, or t
  misc_feature (1404)..(1404): n is a, c, g, or t
  misc_feature (1407)..(1407): n is a, c, g, or t
  misc_feature (1416)..(1416): n is a, c, g, or t
  misc_feature (1419)..(1419): n is a, c, g, or t
  misc_feature (1425)..(1425): n is a, c, g, or t
  misc_feature (1428)..(1428): n is a, c, g, or t
  misc_feature (1434)..(1434): n is a, c, g, or t
  misc_feature (1440)..(1440): n is a, c, g, or t
  misc_feature (1443)..(1443): n is a, c, g, or t
  misc_feature (1446)..(1446): n is a, c, g, or t
  misc_feature (1449)..(1449): n is a, c, g, or t
  misc_feature (1455)..(1455): n is a, c, g, or t
  misc_feature (1458)..(1458): n is a, c, g, or t
  misc_feature (1461)..(1461): n is a, c, g, or t
  misc_feature (1467)..(1467): n is a, c, g, or t
  misc_feature (1470)..(1470): n is a, c, g, or t
  misc_feature (1479)..(1479): n is a, c, g, or t
  misc_feature (1482)..(1482): n is a, c, g, or t
  misc_feature (1485)..(1485): n is a, c, g, or t
  misc_feature (1488)..(1488): n is a, c, g, or t
  misc_feature (1491)..(1491): n is a, c, g, or t
  misc_feature (1494)..(1494): n is a, c, g, or t
  misc_feature (1500)..(1500): n is a, c, g, or t
  misc_feature (1503)..(1503): n is a, c, g, or t
  misc_feature (1506)..(1506): n is a, c, g, or t
  misc_feature (1509)..(1509): n is a, c, g, or t
  misc_feature (1512)..(1512): n is a, c, g, or t
  misc_feature (1515)..(1515): n is a, c, g, or t
  misc_feature (1518)..(1518): n is a, c, g, or t
  misc_feature (1521)..(1521): n is a, c, g, or t
  misc_feature (1524)..(1524): n is a, c, g, or t
  misc_feature (1527)..(1527): n is a, c, g, or t
  misc_feature (1530)..(1530): n is a, c, g, or t
  misc_feature (1533)..(1533): n is a, c, g, or t
  misc_feature (1536)..(1536): n is a, c, g, or t
  misc_feature (1539)..(1539): n is a, c, g, or t
  misc_feature (1542)..(1542): n is a, c, g, or t
  misc_feature (1554)..(1554): n is a, c, g, or t
  misc_feature (1557)..(1557): n is a, c, g, or t
  misc_feature (1566)..(1566): n is a, c, g, or t
  misc_feature (1569)..(1569): n is a, c, g, or t
  misc_feature (1572)..(1572): n is a, c, g, or t
  misc_feature (1575)..(1575): n is a, c, g, or t
  misc_feature (1581)..(1581): n is a, c, g, or t
  misc_feature (1584)..(1584): n is a, c, g, or t
  misc_feature (1590)..(1590): n is a, c, g, or t
  misc_feature (1593)..(1593): n is a, c, g, or t
  misc_feature (1596)..(1596): n is a, c, g, or t
  misc_feature (1599)..(1599): n is a, c, g, or t
  misc_feature (1605)..(1605): n is a, c, g, or t
  misc_feature (1611)..(1611): n is a, c, g, or t
  misc_feature (1614)..(1614): n is a, c, g, or t
  misc_feature (1617)..(1617): n is a, c, g, or t
  misc_feature (1620)..(1620): n is a, c, g, or t
  misc_feature (1629)..(1629): n is a, c, g, or t
  misc_feature (1632)..(1632): n is a, c, g, or t
  misc_feature (1638)..(1638): n is a, c, g, or t
  misc_feature (1641)..(1641): n is a, c, g, or t
  misc_feature (1644)..(1644): n is a, c, g, or t
  misc_feature (1647)..(1647): n is a, c, g, or t
  misc_feature (1650)..(1650): n is a, c, g, or t
  misc_feature (1653)..(1653): n is a, c, g, or t
  misc_feature (1656)..(1656): n is a, c, g, or t
  misc_feature (1662)..(1662): n is a, c, g, or t
  misc_feature (1665)..(1665): n is a, c, g, or t
  misc_feature (1668)..(1668): n is a, c, g, or t
  misc_feature (1671)..(1671): n is a, c, g, or t
  misc_feature (1677)..(1677): n is a, c, g, or t
  misc_feature (1689)..(1689): n is a, c, g, or t
  misc_feature (1695)..(1695): n is a, c, g, or t
  misc_feature (1698)..(1698): n is a, c, g, or t
  misc_feature (1701)..(1701): n is a, c, g, or t
  misc_feature (1704)..(1704): n is a, c, g, or t
  misc_feature (1713)..(1713): n is a, c, g, or t
  misc_feature (1716)..(1716): n is a, c, g, or t
  misc_feature (1722)..(1722): n is a, c, g, or t
  misc_feature (1725)..(1725): n is a, c, g, or t
  misc_feature (1731)..(1731): n is a, c, g, or t
  misc_feature (1734)..(1734): n is a, c, g, or t
  misc_feature (1737)..(1737): n is a, c, g, or t
  misc_feature (1740)..(1740): n is a, c, g, or t
  misc_feature (1743)..(1743): n is a, c, g, or t
  misc_feature (1746)..(1746): n is a, c, g, or t
  misc_feature (1752)..(1752): n is a, c, g, or t
  misc_feature (1755)..(1755): n is a, c, g, or t
  misc_feature (1761)..(1761): n is a, c, g, or t
  misc_feature (1776)..(1776): n is a, c, g, or t
  misc_feature (1779)..(1779): n is a, c, g, or t
  misc_feature (1782)..(1782): n is a, c, g, or t
  misc_feature (1788)..(1788): n is a, c, g, or t
  misc_feature (1791)..(1791): n is a, c, g, or t
  misc_feature (1797)..(1797): n is a, c, g, or t
  misc_feature (1800)..(1800): n is a, c, g, or t
  misc_feature (1803)..(1803): n is a, c, g, or t
  misc_feature (1809)..(1809): n is a, c, g, or t
  misc_feature (1812)..(1812): n is a, c, g, or t
  misc_feature (1815)..(1815): n is a, c, g, or t
  misc_feature (1818)..(1818): n is a, c, g, or t
  misc_feature (1824)..(1824): n is a, c, g, or t
  misc_feature (1827)..(1827): n is a, c, g, or t
  misc_feature (1833)..(1833): n is a, c, g, or t
  misc_feature (1839)..(1839): n is a, c, g, or t
  misc_feature (1842)..(1842): n is a, c, g, or t
  misc_feature (1845)..(1845): n is a, c, g, or t
  misc_feature (1854)..(1854): n is a, c, g, or t
  misc_feature (1857)..(1857): n is a, c, g, or t
  misc_feature (1866)..(1866): n is a, c, g, or t
  misc_feature (1875)..(1875): n is a, c, g, or t
  misc_feature (1881)..(1881): n is a, c, g, or t
  misc_feature (1884)..(1884): n is a, c, g, or t
  misc_feature (1887)..(1887): n is a, c, g, or t
  misc_feature (1890)..(1890): n is a, c, g, or t
  misc_feature (1905)..(1905): n is a, c, g, or t
  misc_feature (1908)..(1908): n is a, c, g, or t
  misc_feature (1911)..(1911): n is a, c, g, or t
  misc_feature (1914)..(1914): n is a, c, g, or t
  misc_feature (1917)..(1917): n is a, c, g, or t
  misc_feature (1923)..(1923): n is a, c, g, or t
  misc_feature (1938)..(1938): n is a, c, g, or t
  misc_feature (1941)..(1941): n is a, c, g, or t
  misc_feature (1944)..(1944): n is a, c, g, or t
  misc_feature (1956)..(1956): n is a, c, g, or t
  misc_feature (1959)..(1959): n is a, c, g, or t
  misc_feature (1962)..(1962): n is a, c, g, or t
  misc_feature (1971)..(1971): n is a, c, g, or t
  misc_feature (1977)..(1977): n is a, c, g, or t
  misc_feature (1986)..(1986): n is a, c, g, or t
  misc_feature (1989)..(1989): n is a, c, g, or t
  misc_feature (1992)..(1992): n is a, c, g, or t
  misc_feature (1995)..(1995): n is a, c, g, or t
  misc_feature (2007)..(2007): n is a, c, g, or t
  misc_feature (2013)..(2013): n is a, c, g, or t
  misc_feature (2019)..(2019): n is a, c, g, or t
  misc_feature (2022)..(2022): n is a, c, g, or t
  misc_feature (2031)..(2031): n is a, c, g, or t
  misc_feature (2037)..(2037): n is a, c, g, or t
  misc_feature (2040)..(2040): n is a, c, g, or t
  misc_feature (2049)..(2049): n is a, c, g, or t
  misc_feature (2052)..(2052): n is a, c, g, or t
  misc_feature (2055)..(2055): n is a, c, g, or t
  misc_feature (2058)..(2058): n is a, c, g, or t
  misc_feature (2064)..(2064): n is a, c, g, or t
  misc_feature (2067)..(2067): n is a, c, g, or t
  misc_feature (2070)..(2070): n is a, c, g, or t
  misc_feature (2076)..(2076): n is a, c, g, or t
  misc_feature (2079)..(2079): n is a, c, g, or t
  misc_feature (2088)..(2088): n is a, c, g, or t
  misc_feature (2094)..(2094): n is a, c, g, or t
  misc_feature (2100)..(2100): n is a, c, g, or t
  misc_feature (2103)..(2103): n is a, c, g, or t
  misc_feature (2109)..(2109): n is a, c, g, or t
  misc_feature (2112)..(2112): n is a, c, g, or t
  misc_feature (2115)..(2115): n is a, c, g, or t
  misc_feature (2118)..(2118): n is a, c, g, or t
  misc_feature (2121)..(2121): n is a, c, g, or t
  misc_feature (2124)..(2124): n is a, c, g, or t
  misc_feature (2130)..(2130): n is a, c, g, or t
atgccnwsntgggcnytnttyatggtnacnwsntgyytnytnytngcnccncaraayytngcncargtnwsnwsncargaygtnwsnytnytngcnwsngaywsngarccnytnaartgyttywsnmgnacnttygargayytnacntgyttytgggaygargargargcngcnccnwsnggnacntaycarytnytntaygcntayccnmgngaraarccnmgngcntgyccnytnwsnwsncarwsnatgccncayttyggnacnmgntaygtntgycarttyccngaycargargargtnmgnytnttyttyccnytncayytntgggtnaaraaygtnttyytnaaycaracnmgnacncarmgngtnytnttygtngaywsngtnggnytnccngcnccnccnwsnathathaargcnatgggnggnwsncarccnggngarytncarathwsntgggargarccngcnccngarathwsngayttyytnmgntaygarytnmgntayggnccnmgngayccnaaraaywsnacnggnccnacngtnathcarytnathgcnacngaracntgytgyccngcnytncarmgnccncaywsngcnwsngcnytngaycarwsnccntgygcncarccnacnatgccntggcargayggnccnaarcaracnwsnccnwsnmgngargcnwsngcnytnacngcngarggnggnwsntgyytnathwsnggnytncarccnggnaaywsntaytggytncarytnmgnwsngarccngayggnathwsnytnggnggnwsntggggnwsntggwsnytnccngtnacngtngayytnccnggngaygcngtngcnytnggnytncartgyttyacnytngayytnaaraaygtnacntgycartggcarcarcargaycaygcnwsnwsncarggnttyttytaycaywsnmgngcnmgntgytgyccnmgngaymgntayccnathtgggaraaytgygargargargaraaracnaayccnggnytncaracnccncarttywsnmgntgycayttyaarwsnmgnaaygaywsnathathcayathytngtngargtnacnacngcnccnggnacngtncaywsntayytnggnwsnccnttytggathcaycargcngtnmgnytnccnacnccnaayytncaytggmgngarathwsnwsnggncayytngarytngartggcarcayccnwsnwsntgggcngcncargaracntgytaycarytnmgntayacnggngarggncaycargaytggaargtnytngarccnccnytnggngcnmgnggnggnacnytngarytnmgnccnmgnwsnmgntaymgnytncarytnmgngcnmgnytnaayggnccnacntaycarggnccntggwsnwsntggwsngayccnacnmgngtngaracngcnacngaracngcntggathwsnytngtnacngcnytncayytngtnytnggnytnwsngcngtnytnggnytnytnytnytnmgntggcarttyccngcncaytaymgnmgnytnmgncaygcnytntggccnwsnytnccngayytncaymgngtnytnggncartayytnmgngayacngcngcnytnwsnccnccnaargcnacngtnwsngayacntgygargargtngarccnwsnytnytngarathytnccnaarwsnwsngarmgnacnccnytnccnytntgywsnwsncargcncaratggaytaymgnmgnytncarccnwsntgyytnggnacnatgccnytnwsngtntgyccnccnatggcngarwsnggnwsntgytgyacnacncayathgcnaaycaywsntayytnccnytnwsntaytggcarcarccnmgnmgnmgnggnaaracnaaycaytaycaracnacngtngaraaraarwsnytnacnathtaygcncargtncaraarccnggnccnytncaraaraarytngaywsnttyccngcncargayccntgyacnacnathtaygtngcngcnacngarccngtnccngarwsngtncargaracnaaywsnathacngtntaygcnwsngtnacnytnccngarwsntrrtrr

SEQ ID NO: 20 - DNA, 2169 bp, Artificial Sequence
  TpoR.IL2r-gamma
  misc_feature (6)..(6): n is a, c, g, or t
  misc_feature (9)..(9): n is a, c, g, or t
  misc_feature (15)..(15): n is a, c, g, or t
  misc_feature (18)..(18): n is a, c, g, or t
  misc_feature (27)..(27): n is a, c, g, or t
  misc_feature (30)..(30): n is a, c, g, or t
  misc_feature (33)..(33): n is a, c, g, or t
  misc_feature (39)..(39): n is a, c, g, or t
  misc_feature (42)..(42): n is a, c, g, or t
  misc_feature (45)..(45): n is a, c, g, or t
  misc_feature (48)..(48): n is a, c, g, or t
  misc_feature (51)..(51): n is a, c, g, or t
  misc_feature (60)..(60): n is a, c, g, or t
  misc_feature (63)..(63): n is a, c, g, or t
  misc_feature (69)..(69): n is a, c, g, or t
  misc_feature (72)..(72): n is a, c, g, or t
  misc_feature (75)..(75): n is a, c, g, or t
  misc_feature (84)..(84): n is a, c, g, or t
  misc_feature (87)..(87): n is a, c, g, or t
  misc_feature (90)..(90): n is a, c, g, or t
  misc_feature (93)..(93): n is a, c, g, or t
  misc_feature (96)..(96): n is a, c, g, or t
  misc_feature (99)..(99): n is a, c, g, or t
  misc_feature (105)..(105): n is a, c, g, or t
  misc_feature (111)..(111): n is a, c, g, or t
  misc_feature (114)..(114): n is a, c, g, or t
  misc_feature (126)..(126): n is a, c, g, or t
  misc_feature (129)..(129): n is a, c, g, or t
  misc_feature (132)..(132): n is a, c, g, or t
  misc_feature (144)..(144): n is a, c, g, or t
  misc_feature (147)..(147): n is a, c, g, or t
  misc_feature (171)..(171): n is a, c, g, or t
  misc_feature (174)..(174): n is a, c, g, or t
  misc_feature (177)..(177): n is a, c, g, or t
  misc_feature (180)..(180): n is a, c, g, or t
  misc_feature (183)..(183): n is a, c, g, or t
  misc_feature (186)..(186): n is a, c, g, or t
  misc_feature (195)..(195): n is a, c, g, or t
  misc_feature (198)..(198): n is a, c, g, or t
  misc_feature (204)..(204): n is a, c, g, or t
  misc_feature (210)..(210): n is a, c, g, or t
  misc_feature (213)..(213): n is a, c, g, or t
  misc_feature (222)..(222): n is a, c, g, or t
  misc_feature (225)..(225): n is a, c, g, or t
  misc_feature (228)..(228): n is a, c, g, or t
  misc_feature (234)..(234): n is a, c, g, or t
  misc_feature (237)..(237): n is a, c, g, or t
  misc_feature (240)..(240): n is a, c, g, or t
  misc_feature (243)..(243): n is a, c, g, or t
  misc_feature (249)..(249): n is a, c, g, or t
  misc_feature (255)..(255): n is a, c, g, or t
  misc_feature (264)..(264): n is a, c, g, or t
  misc_feature (267)..(267): n is a, c, g, or t
  misc_feature (270)..(270): n is a, c, g, or t
  misc_feature (276)..(276): n is a, c, g, or t
  misc_feature (288)..(288): n is a, c, g, or t
  misc_feature (303)..(303): n is a, c, g, or t
  misc_feature (306)..(306): n is a, c, g, or t
  misc_feature (309)..(309): n is a, c, g, or t
  misc_feature (318)..(318): n is a, c, g, or t
  misc_feature (321)..(321): n is a, c, g, or t
  misc_feature (327)..(327): n is a, c, g, or t
  misc_feature (333)..(333): n is a, c, g, or t
  misc_feature (342)..(342): n is a, c, g, or t
  misc_feature (348)..(348): n is a, c, g, or t
  misc_feature (357)..(357): n is a, c, g, or t
  misc_feature (360)..(360): n is a, c, g, or t
  misc_feature (363)..(363): n is a, c, g, or t
  misc_feature (369)..(369): n is a, c, g, or t
  misc_feature (372)..(372): n is a, c, g, or t
  misc_feature (375)..(375): n is a, c, g, or t
  misc_feature (381)..(381): n is a, c, g, or t
  misc_feature (387)..(387): n is a, c, g, or t
  misc_feature (390)..(390): n is a, c, g, or t
  misc_feature (393)..(393): n is a, c, g, or t
  misc_feature (396)..(396): n is a, c, g, or t
  misc_feature (399)..(399): n is a, c, g, or t
  misc_feature (402)..(402): n is a, c, g, or t
  misc_feature (405)..(405): n is a, c, g, or t
  misc_feature (408)..(408): n is a, c, g, or t
  misc_feature (411)..(411): n is a, c, g, or t
  misc_feature (423)..(423): n is a, c, g, or t
  misc_feature (429)..(429): n is a, c, g, or t
  misc_feature (432)..(432): n is a, c, g, or t
  misc_feature (435)..(435): n is a, c, g, or t
  misc_feature (441)..(441): n is a, c, g, or t
  misc_feature (444)..(444): n is a, c, g, or t
  misc_feature (450)..(450): n is a, c, g, or t
  misc_feature (459)..(459): n is a, c, g, or t
  misc_feature (471)..(471): n is a, c, g, or t
  misc_feature (474)..(474): n is a, c, g, or t
  misc_feature (477)..(477): n is a, c, g, or t
  misc_feature (486)..(486): n is a, c, g, or t
  misc_feature (495)..(495): n is a, c, g, or t
  misc_feature (498)..(498): n is a, c, g, or t
  misc_feature (507)..(507): n is a, c, g, or t
  misc_feature (510)..(510): n is a, c, g, or t
  misc_feature (516)..(516): n is a, c, g, or t
  misc_feature (519)..(519): n is a, c, g, or t
  misc_feature (522)..(522): n is a, c, g, or t
  misc_feature (528)..(528): n is a, c, g, or t
  misc_feature (537)..(537): n is a, c, g, or t
  misc_feature (540)..(540): n is a, c, g, or t
  misc_feature (543)..(543): n is a, c, g, or t
  misc_feature (546)..(546): n is a, c, g, or t
  misc_feature (549)..(549): n is a, c, g, or t
  misc_feature (552)..(552): n is a, c, g, or t
  misc_feature (561)..(561): n is a, c, g, or t
  misc_feature (567)..(567): n is a, c, g, or t
  misc_feature (570)..(570): n is a, c, g, or t
  misc_feature (576)..(576): n is a, c, g, or t
  misc_feature (585)..(585): n is a, c, g, or t
  misc_feature (588)..(588): n is a, c, g, or t
  misc_feature (591)..(591): n is a, c, g, or t
  misc_feature (597)..(597): n is a, c, g, or t
  misc_feature (600)..(600): n is a, c, g, or t
  misc_feature (606)..(606): n is a, c, g, or t
  misc_feature (609)..(609): n is a, c, g, or t
  misc_feature (612)..(612): n is a, c, g, or t
  misc_feature (615)..(615): n is a, c, g, or t
  misc_feature (618)..(618): n is a, c, g, or t
  misc_feature (627)..(627): n is a, c, g, or t
  misc_feature (630)..(630): n is a, c, g, or t
  misc_feature (636)..(636): n is a, c, g, or t
  misc_feature (642)..(642): n is a, c, g, or t
  misc_feature (645)..(645): n is a, c, g, or t
  misc_feature (651)..(651): n is a, c, g, or t
  misc_feature (663)..(663): n is a, c, g, or t
  misc_feature (666)..(666): n is a, c, g, or t
  misc_feature (675)..(675): n is a, c, g, or t
  misc_feature (678)..(678): n is a, c, g, or t
  misc_feature (681)..(681): n is a, c, g, or t
  misc_feature (684)..(684): n is a, c, g, or t
  misc_feature (687)..(687): n is a, c, g, or t
  misc_feature (693)..(693): n is a, c, g, or t
  misc_feature (696)..(696): n is a, c, g, or t
  misc_feature (699)..(699): n is a, c, g, or t
  misc_feature (702)..(702): n is a, c, g, or t
  misc_feature (705)..(705): n is a, c, g, or t
  misc_feature (708)..(708): n is a, c, g, or t
  misc_feature (714)..(714): n is a, c, g, or t
  misc_feature (717)..(717): n is a, c, g, or t
  misc_feature (720)..(720): n is a, c, g, or t
  misc_feature (726)..(726): n is a, c, g, or t
  misc_feature (732)..(732): n is a, c, g, or t
  misc_feature (735)..(735): n is a, c, g, or t
  misc_feature (738)..(738): n is a, c, g, or t
  misc_feature (744)..(744): n is a, c, g, or t
  misc_feature (747)..(747): n is a, c, g, or t
  misc_feature (753)..(753): n is a, c, g, or t
  misc_feature (762)..(762): n is a, c, g, or t
  misc_feature (768)..(768): n is a, c, g, or t
  misc_feature (771)..(771): n is a, c, g, or t
  misc_feature (774)..(774): n is a, c, g, or t
  misc_feature (780)..(780): n is a, c, g, or t
  misc_feature (786)..(786): n is a, c, g, or t
  misc_feature (792)..(792): n is a, c, g, or t
  misc_feature (795)..(795): n is a, c, g, or t
  misc_feature (798)..(798): n is a, c, g, or t
  misc_feature (801)..(801): n is a, c, g, or t
  misc_feature (804)..(804): n is a, c, g, or t
  misc_feature (810)..(810): n is a, c, g, or t
  misc_feature (813)..(813): n is a, c, g, or t
  misc_feature (819)..(819): n is a, c, g, or t
  misc_feature (822)..(822): n is a, c, g, or t
  misc_feature (825)..(825): n is a, c, g, or t
  misc_feature (828)..(828): n is a, c, g, or t
  misc_feature (831)..(831): n is a, c, g, or t
  misc_feature (834)..(834): n is a, c, g, or t
  misc_feature (840)..(840): n is a, c, g, or t
  misc_feature (843)..(843): n is a, c, g, or t
  misc_feature (846)..(846): n is a, c, g, or t
  misc_feature (852)..(852): n is a, c, g, or t
  misc_feature (855)..(855): n is a, c, g, or t
  misc_feature (858)..(858): n is a, c, g, or t
  misc_feature (861)..(861): n is a, c, g, or t
  misc_feature (864)..(864): n is a, c, g, or t
  misc_feature (867)..(867): n is a, c, g, or t
  misc_feature (879)..(879): n is a, c, g, or t
  misc_feature (882)..(882): n is a, c, g, or t
  misc_feature (888)..(888): n is a, c, g, or t
  misc_feature (897)..(897): n is a, c, g, or t
  misc_feature (900)..(900): n is a, c, g, or t
  misc_feature (927)..(927): n is a, c, g, or t
  misc_feature (930)..(930): n is a, c, g, or t
  misc_feature (933)..(933): n is a, c, g, or t
  misc_feature (939)..(939): n is a, c, g, or t
  misc_feature (954)..(954): n is a, c, g, or t
  misc_feature (957)..(957): n is a, c, g, or t
  misc_feature (960)..(960): n is a, c, g, or t
  misc_feature (963)..(963): n is a, c, g, or t
  misc_feature (972)..(972): n is a, c, g, or t
  misc_feature (975)..(975): n is a, c, g, or t
  misc_feature (981)..(981): n is a, c, g, or t
  misc_feature (987)..(987): n is a, c, g, or t
  misc_feature (1020)..(1020): n is a, c, g, or t
  misc_feature (1026)..(1026): n is a, c, g, or t
  misc_feature (1029)..(1029): n is a, c, g, or t
  misc_feature (1032)..(1032): n is a, c, g, or t
  misc_feature (1038)..(1038): n is a, c, g, or t
  misc_feature (1041)..(1041): n is a, c, g, or t
  misc_feature (1050)..(1050): n is a, c, g, or t
  misc_feature (1053)..(1053): n is a, c, g, or t
  misc_feature (1068)..(1068): n is a, c, g, or t
  misc_feature (1071)..(1071): n is a, c, g, or t
  misc_feature (1080)..(1080): n is a, c, g, or t
  misc_feature (1095)..(1095): n is a, c, g, or t
  misc_feature (1098)..(1098): n is a, c, g, or t
  misc_feature (1104)..(1104): n is a, c, g, or t
  misc_feature (1107)..(1107): n is a, c, g, or t
  misc_feature (1110)..(1110): n is a, c, g, or t
  misc_feature (1113)..(1113): n is a, c, g, or t
  misc_feature (1116)..(1116): n is a, c, g, or t
  misc_feature (1119)..(1119): n is a, c, g, or t
  misc_feature (1122)..(1122): n is a, c, g, or t
  misc_feature (1125)..(1125): n is a, c, g, or t
  misc_feature (1131)..(1131): n is a, c, g, or t
  misc_feature (1137)..(1137): n is a, c, g, or t
  misc_feature (1140)..(1140): n is a, c, g, or t
  misc_feature (1143)..(1143): n is a, c, g, or t
  misc_feature (1146)..(1146): n is a, c, g, or t
  misc_feature (1164)..(1164): n is a, c, g, or t
  misc_feature (1167)..(1167): n is a, c, g, or t
  misc_feature (1170)..(1170): n is a, c, g, or t
  misc_feature (1173)..(1173): n is a, c, g, or t
  misc_feature (1176)..(1176): n is a, c, g, or t
  misc_feature (1179)..(1179): n is a, c, g, or t
  misc_feature (1182)..(1182): n is a, c, g, or t
  misc_feature (1188)..(1188): n is a, c, g, or t
  misc_feature (1197)..(1197): n is a, c, g, or t
  misc_feature (1206)..(1206): n is a, c, g, or t
  misc_feature (1209)..(1209): n is a, c, g, or t
  misc_feature (1212)..(1212): n is a, c, g, or t
  misc_feature (1218)..(1218): n is a, c, g, or t
  misc_feature (1224)..(1224): n is a, c, g, or t
  misc_feature (1239)..(1239): n is a, c, g, or t
  misc_feature (1242)..(1242): n is a, c, g, or t
  misc_feature (1245)..(1245): n is a, c, g, or t
  misc_feature (1251)..(1251): n is a, c, g, or t
  misc_feature (1254)..(1254): n is a, c, g, or t
  misc_feature (1263)..(1263): n is a, c, g, or t
  misc_feature (1275)..(1275): n is a, c, g, or t
  misc_feature (1278)..(1278): n is a, c, g, or t
  misc_feature (1284)..(1284): n is a, c, g, or t
  misc_feature (1287)..(1287): n is a, c, g, or t
  misc_feature (1293)..(1293): n is a, c, g, or t
  misc_feature (1311)..(1311): n is a, c, g, or t
  misc_feature (1314)..(1314): n is a, c, g, or t
  misc_feature (1320)..(1320): n is a, c, g, or t
  misc_feature (1323)..(1323): n is a, c, g, or t
  misc_feature (1326)..(1326): n is a, c, g, or t
  misc_feature (1329)..(1329): n is a, c, g, or t
  misc_feature (1332)..(1332): n is a, c, g, or t
  misc_feature (1335)..(1335): n is a, c, g, or t
  misc_feature (1338)..(1338): n is a, c, g, or t
  misc_feature (1341)..(1341): n is a, c, g, or t
  misc_feature (1344)..(1344): n is a, c, g, or t
  misc_feature (1347)..(1347): n is a, c, g, or t
  misc_feature (1353)..(1353): n is a, c, g, or t
  misc_feature (1356)..(1356): n is a, c, g, or t
  misc_feature (1359)..(1359): n is a, c, g, or t
  misc_feature (1362)..(1362): n is a, c, g, or t
  misc_feature (1365)..(1365): n is a, c, g, or t
  misc_feature (1368)..(1368): n is a, c, g, or t
  misc_feature (1374)..(1374): n is a, c, g, or t
  misc_feature (1377)..(1377): n is a, c, g, or t
  misc_feature (1383)..(1383): n is a, c, g, or t
  misc_feature (1386)..(1386): n is a, c, g, or t
  misc_feature (1389)..(1389): n is a, c, g, or t
  misc_feature (1392)..(1392): n is a, c, g, or t
  misc_feature (1395)..(1395): n is a, c, g, or t
  misc_feature (1401)..(1401): n is a, c, g, or t
  misc_feature (1404)..(1404): n is a, c, g, or t
  misc_feature (1407)..(1407): n is a, c, g, or t
  misc_feature (1416)..(1416): n is a, c, g, or t
  misc_feature (1419)..(1419): n is a, c, g, or t
  misc_feature (1425)..(1425): n is a, c, g, or t
  misc_feature (1428)..(1428): n is a, c, g, or t
  misc_feature (1434)..(1434): n is a, c, g, or t
  misc_feature (1440)..(1440): n is a, c, g, or t
  misc_feature (1443)..(1443): n is a, c, g, or t
  misc_feature (1446)..(1446): n is a, c, g, or t
  misc_feature (1449)..(1449): n is a, c, g, or t
  misc_feature (1455)..(1455): n is a, c, g, or t
  misc_feature (1458)..(1458): n is a, c, g, or t
  misc_feature (1461)..(1461): n is a, c, g, or t
  misc_feature (1467)..(1467): n is a, c, g, or t
  misc_feature (1470)..(1470): n is a, c, g, or t
  misc_feature (1479)..(1479): n is a, c, g, or t
  misc_feature (1482)..(1482): n is a, c, g, or t
  misc_feature (1485)..(1485): n is a, c, g, or t
  misc_feature (1488)..(1488): n is a, c, g, or t
  misc_feature (1491)..(1491): n is a, c, g, or t
  misc_feature (1494)..(1494): n is a, c, g, or t
  misc_feature (1500)..(1500): n is a, c, g, or t
  misc_feature (1503)..(1503): n is a, c, g, or t
  misc_feature (1506)..(1506): n is a, c, g, or t
  misc_feature (1509)..(1509): n is a, c, g, or t
  misc_feature (1512)..(1512): n is a, c, g, or t
  misc_feature (1515)..(1515): n is a, c, g, or t
  misc_feature (1518)..(1518): n is a, c, g, or t
  misc_feature (1521)..(1521): n is a, c, g, or t
  misc_feature (1524)..(1524): n is a, c, g, or t
  misc_feature (1527)..(1527): n is a, c, g, or t
  misc_feature (1530)..(1530): n is a, c, g, or t
  misc_feature (1533)..(1533): n is a, c, g, or t
  misc_feature (1536)..(1536): n is a, c, g, or t
  misc_feature (1539)..(1539): n is a, c, g, or t
  misc_feature (1542)..(1542): n is a, c, g, or t
  misc_feature (1554)..(1554): n is a, c, g, or t
  misc_feature (1557)..(1557): n is a, c, g, or t
  misc_feature (1566)..(1566): n is a, c, g, or t
  misc_feature (1569)..(1569): n is a, c, g, or t
  misc_feature (1572)..(1572): n is a, c, g, or t
  misc_feature (1575)..(1575): n is a, c, g, or t
  misc_feature (1581)..(1581): n is a, c, g, or t
  misc_feature (1584)..(1584): n is a, c, g, or t
  misc_feature (1590)..(1590): n is a, c, g, or t
  misc_feature (1593)..(1593): n is a, c, g, or t
  misc_feature (1596)..(1596): n is a, c, g, or t
  misc_feature (1599)..(1599): n is a, c, g, or t
  misc_feature (1605)..(1605): n is a, c, g, or t
  misc_feature (1611)..(1611): n is a, c, g, or t
  misc_feature (1614)..(1614): n is a, c, g, or t
  misc_feature (1617)..(1617): n is a, c, g, or t
  misc_feature (1620)..(1620): n is a, c, g, or t
  misc_feature (1629)..(1629): n is a, c, g, or t
  misc_feature (1632)..(1632): n is a, c, g, or t
  misc_feature (1638)..(1638): n is a, c, g, or t
  misc_feature (1641)..(1641): n is a, c, g, or t
  misc_feature (1644)..(1644): n is a, c, g, or t
  misc_feature (1647)..(1647): n is a, c, g, or t
  misc_feature (1650)..(1650): n is a, c, g, or t
  misc_feature (1653)..(1653): n is a, c, g, or t
  misc_feature (1656)..(1656): n is a, c, g, or t
  misc_feature (1662)..(1662): n is a, c, g, or t
  misc_feature (1665)..(1665): n is a, c, g, or t
  misc_feature (1668)..(1668): n is a, c, g, or t
  misc_feature (1671)..(1671): n is a, c, g, or t
  misc_feature (1677)..(1677): n is a, c, g, or t
  misc_feature (1689)..(1689): n is a, c, g, or t
  misc_feature (1695)..(1695): n is a, c, g, or t
  misc_feature (1698)..(1698): n is a, c, g, or t
  misc_feature (1701)..(1701): n is a, c, g, or t
  misc_feature (1704)..(1704): n is a, c, g, or t
  misc_feature (1713)..(1713): n is a, c, g, or t
  misc_feature (1716)..(1716): n is a, c, g, or t
  misc_feature (1722)..(1722): n is a, c, g, or t
  misc_feature (1725)..(1725): n is a, c, g, or t
  misc_feature (1731)..(1731): n is a, c, g, or t
  misc_feature (1734)..(1734): n is a, c, g, or t
  misc_feature (1737)..(1737): n is a, c, g, or t
  misc_feature (1740)..(1740): n is a, c, g, or t
  misc_feature (1743)..(1743): n is a, c, g, or t
  misc_feature (1746)..(1746): n is a, c, g, or t
  misc_feature (1752)..(1752): n is a, c, g, or t
  misc_feature (1755)..(1755): n is a, c, g, or t
  misc_feature (1761)..(1761): n is a, c, g, or t
  misc_feature (1776)..(1776): n is a, c, g, or t
  misc_feature (1779)..(1779): n is a, c, g, or t
  misc_feature (1782)..(1782): n is a, c, g, or t
  misc_feature (1788)..(1788): n is a, c, g, or t
  misc_feature (1791)..(1791): n is a, c, g, or t
  misc_feature (1797)..(1797): n is a, c, g, or t
  misc_feature (1800)..(1800): n is a, c, g, or t
  misc_feature (1803)..(1803): n is a, c, g, or t
  misc_feature (1809)..(1809): n is a, c, g, or t
  misc_feature (1812)..(1812): n is a, c, g, or t
  misc_feature (1815)..(1815): n is a, c, g, or t
  misc_feature (1818)..(1818): n is a, c, g, or t
  misc_feature (1824)..(1824): n is a, c, g, or t
  misc_feature (1827)..(1827): n is a, c, g, or t
  misc_feature (1833)..(1833): n is a, c, g, or t
  misc_feature (1839)..(1839): n is a, c, g, or t
  misc_feature (1842)..(1842): n is a, c, g, or t
  misc_feature (1845)..(1845): n is a, c, g, or t
  misc_feature (1854)..(1854): n is a, c, g, or t
  misc_feature (1857)..(1857): n is a, c, g, or t
  misc_feature (1866)..(1866): n is a, c, g, or t
  misc_feature (1875)..(1875): n is a, c, g, or t
  misc_feature (1881)..(1881): n is a, c, g, or t
  misc_feature (1884)..(1884): n is a, c, g, or t
  misc_feature (1887)..(1887): n is a, c, g, or t
  misc_feature (1890)..(1890): n is a, c, g, or t
  misc_feature (1905)..(1905): n is a, c, g, or t
  misc_feature (1911)..(1911): n is a, c, g, or t
  misc_feature (1914)..(1914): n is a, c, g, or t
  misc_feature (1920)..(1920): n is a, c, g, or t
  misc_feature (1923)..(1923): n is a, c, g, or t
  misc_feature (1929)..(1929): n is a, c, g, or t
  misc_feature (1932)..(1932): n is a, c, g, or t
  misc_feature (1935)..(1935): n is a, c, g, or t
  misc_feature (1944)..(1944): n is a, c, g, or t
  misc_feature (1953)..(1953): n is a, c, g, or t
  misc_feature (1956)..(1956): n is a, c, g, or t
  misc_feature (1959)..(1959): n is a, c, g, or t
  misc_feature (1971)..(1971): n is a, c, g, or t
  misc_feature (1980)..(1980): n is a, c, g, or t
  misc_feature (1983)..(1983): n is a, c, g, or t
  misc_feature (1989)..(1989): n is a, c, g, or t
  misc_feature (1992)..(1992): n is a, c, g, or t
  misc_feature (1995)..(1995): n is a, c, g, or t
  misc_feature (1998)..(1998): n is a, c, g, or t
  misc_feature (2004)..(2004): n is a, c, g, or t
  misc_feature (2007)..(2007): n is a, c, g, or t
  misc_feature (2010)..(2010): n is a, c, g, or t
  misc_feature (2016)..(2016): n is a, c, g, or t
  misc_feature (2019)..(2019): n is a, c, g, or t
  misc_feature (2025)..(2025): n is a, c, g, or t
  misc_feature (2034)..(2034): n is a, c, g, or t
  misc_feature (2040)..(2040): n is a, c, g, or t
  misc_feature (2043)..(2043): n is a, c, g, or t
  misc_feature (2049)..(2049): n is a, c, g, or t
  misc_feature (2052)..(2052): n is a, c, g, or t
  misc_feature (2055)..(2055): n is a, c, g, or t
  misc_feature (2064)..(2064): n is a, c, g, or t
  misc_feature (2067)..(2067): n is a, c, g, or t
  misc_feature (2073)..(2073): n is a, c, g, or t
  misc_feature (2076)..(2076): n is a, c, g, or t
  misc_feature (2079)..(2079): n is a, c, g, or t
  misc_feature (2082)..(2082): n is a, c, g, or t
  misc_feature (2085)..(2085): n is a, c, g, or t
  misc_feature (2091)..(2091): n is a, c, g, or t
  misc_feature (2094)..(2094): n is a, c, g, or t
  misc_feature (2097)..(2097): n is a, c, g, or t
  misc_feature (2100)..(2100): n is a, c, g, or t
  misc_feature (2103)..(2103): n is a, c, g, or t
  misc_feature (2106)..(2106): n is a, c, g, or t
  misc_feature (2121)..(2121): n is a, c, g, or t
  misc_feature (2124)..(2124): n is a, c, g, or t
  misc_feature (2133)..(2133): n is a, c, g, or t
  misc_feature (2136)..(2136): n is a, c, g, or t
  misc_feature (2139)..(2139): n is a, c, g, or t
  misc_feature (2148)..(2148): n is a, c, g, or t
  misc_feature (2151)..(2151): n is a, c, g, or t
  misc_feature (2157)..(2157): n is a, c, g, or t
  misc_feature (2163)..(2163): n is a, c, g, or t
atgccnwsntgggcnytnttyatggtnacnwsntgyytnytnytngcnccncaraayytngcncargtnwsnwsncargaygtnwsnytnytngcnwsngaywsngarccnytnaartgyttywsnmgnacnttygargayytnacntgyttytgggaygargargargcngcnccnwsnggnacntaycarytnytntaygcntayccnmgngaraarccnmgngcntgyccnytnwsnwsncarwsnatgccncayttyggnacnmgntaygtntgycarttyccngaycargargargtnmgnytnttyttyccnytncayytntgggtnaaraaygtnttyytnaaycaracnmgnacncarmgngtnytnttygtngaywsngtnggnytnccngcnccnccnwsnathathaargcnatgggnggnwsncarccnggngarytncarathwsntgggargarccngcnccngarathwsngayttyytnmgntaygarytnmgntayggnccnmgngayccnaaraaywsnacnggnccnacngtnathcarytnathgcnacngaracntgytgyccngcnytncarmgnccncaywsngcnwsngcnytngaycarwsnccntgygcncarccnacnatgccntggcargayggnccnaarcaracnwsnccnwsnmgngargcnwsngcnytnacngcngarggnggnwsntgyytnathwsnggnytncarccnggnaaywsntaytggytncarytnmgnwsngarccngayggnathwsnytnggnggnwsntggggnwsntggwsnytnccngtnacngtngayytnccnggngaygcngtngcnytnggnytncartgyttyacnytngayytnaaraaygtnacntgycartggcarcarcargaycaygcnwsnwsncarggnttyttytaycaywsnmgngcnmgntgytgyccnmgngaymgntayccnathtgggaraaytgygargargargaraaracnaayccnggnytncaracnccncarttywsnmgntgycayttyaarwsnmgnaaygaywsnathathcayathytngtngargtnacnacngcnccnggnacngtncaywsntayytnggnwsnccnttytggathcaycargcngtnmgnytnccnacnccnaayytncaytggmgngarathwsnwsnggncayytngarytngartggcarcayccnwsnwsntgggcngcncargaracntgytaycarytnmgntayacnggngarggncaycargaytggaargtnytngarccnccnytnggngcnmgnggnggnacnytngarytnmgnccnmgnwsnmgntaymgnytncarytnmgngcnmgnytnaayggnccnacntaycarggnccntggwsnwsntggwsngayccnacnmgngtngaracngcnacngaracngcntggathwsnytngtnacngcnytncayytngtnytnggnytnwsngcngtnytnggnytnytnytnytnmgntggcarttyccngcncaytaymgnmgnytnmgncaygcnytntggccnwsnytnccngayytncaymgngtnytnggncartayytnmgngayacngcngcnytnwsnccnccnaargcnacngtnwsngayacntgygargargtngarccnwsnytnytngarathytnccnaarwsnwsngarmgnacnccnytnccnytntgywsnwsncargcncaratggaytaymgnmgnytncarccnwsntgyytnggnacnatgccnytnwsngtntgyccnccnatggcngarwsnggnwsntgytgyacnacncayathgcnaaycaywsntayytnccnytnwsntaytggcarcarccngarmgnacnatgccnmgnathccnacnytnaaraayytngargayytngtnacngartaycayggnaayttywsngcntggwsnggngtnwsnaarggnytngcngarwsnytncarccngaytaywsngarmgnytntgyytngtnwsngarathccnccnaarggnggngcnytnggngarggnccnggngcnwsnccntgyaaycarcaywsnccntaytgggcnccnccntgytayacnytnaarccngaracntrrtrr

SEQ ID NO: 21 - DNA, 2457 bp, Artificial Sequence
  TpoR-TLR1
  misc_feature (6)..(6): n is a, c, g, or t
  misc_feature (9)..(9): n is a, c, g, or t
  misc_feature (15)..(15): n is a, c, g, or t
  misc_feature (18)..(18): n is a, c, g, or t
  misc_feature (27)..(27): n is a, c, g, or t
  misc_feature (30)..(30): n is a, c, g, or t
  misc_feature (33)..(33): n is a, c, g, or t
  misc_feature (39)..(39): n is a, c, g, or t
  misc_feature (42)..(42): n is a, c, g, or t
  misc_feature (45)..(45): n is a, c, g, or t
  misc_feature (48)..(48): n is a, c, g, or t
  misc_feature (51)..(51): n is a, c, g, or t
  misc_feature (60)..(60): n is a, c, g, or t
  misc_feature (63)..(63): n is a, c, g, or t
  misc_feature (69)..(69): n is a, c, g, or t
  misc_feature (72)..(72): n is a, c, g, or t
  misc_feature (75)..(75): n is a, c, g, or t
  misc_feature (84)..(84): n is a, c, g, or t
  misc_feature (87)..(87): n is a, c, g, or t
  misc_feature (90)..(90): n is a, c, g, or t
  misc_feature (93)..(93): n is a, c, g, or t
  misc_feature (96)..(96): n is a, c, g, or t
  misc_feature (99)..(99): n is a, c, g, or t
  misc_feature (105)..(105): n is a, c, g, or t
  misc_feature (111)..(111): n is a, c, g, or t
  misc_feature (114)..(114): n is a, c, g, or t
  misc_feature (126)..(126): n is a, c, g, or t
  misc_feature (129)..(129): n is a, c, g, or t
  misc_feature (132)..(132): n is a, c, g, or t
  misc_feature (144)..(144): n is a, c, g, or t
  misc_feature (147)..(147): n is a, c, g, or t
  misc_feature (171)..(171): n is a, c, g, or t
  misc_feature (174)..(174): n is a, c, g, or t
  misc_feature (177)..(177): n is a, c, g, or t
  misc_feature (180)..(180): n is a, c, g, or t
  misc_feature (183)..(183): n is a, c, g, or t
  misc_feature (186)..(186): n is a, c, g, or t
  misc_feature (195)..(195): n is a, c, g, or t
  misc_feature (198)..(198): n is a, c, g, or t
  misc_feature (204)..(204): n is a, c, g, or t
  misc_feature (210)..(210): n is a, c, g, or t
  misc_feature (213)..(213): n is a, c, g, or t
  misc_feature (222)..(222): n is a, c, g, or t
  misc_feature (225)..(225): n is a, c, g, or t
  misc_feature (228)..(228): n is a, c, g, or t
  misc_feature (234)..(234): n is a, c, g, or t
  misc_feature (237)..(237): n is a, c, g, or t
  misc_feature (240)..(240): n is a, c, g, or t
  misc_feature (243)..(243): n is a, c, g, or t
  misc_feature (249)..(249): n is a, c, g, or t
  misc_feature (255)..(255): n is a, c, g, or t
  misc_feature (264)..(264): n is a, c, g, or t
  misc_feature (267)..(267): n is a, c, g, or t
  misc_feature (270)..(270): n is a, c, g, or t
  misc_feature (276)..(276): n is a, c, g, or t
  misc_feature (288)..(288): n is a, c, g, or t
  misc_feature (303)..(303): n is a, c, g, or t
  misc_feature (306)..(306): n is a, c, g, or t
  misc_feature (309)..(309): n is a, c, g, or t
  misc_feature (318)..(318): n is a, c, g, or t
  misc_feature (321)..(321): n is a, c, g, or t
  misc_feature (327)..(327): n is a, c, g, or t
  misc_feature (333)..(333): n is a, c, g, or t
  misc_feature (342)..(342): n is a, c, g, or t
  misc_feature (348)..(348): n is a, c, g, or t
  misc_feature (357)..(357): n is a, c, g, or t
  misc_feature (360)..(360): n is a, c, g, or t
  misc_feature (363)..(363): n is a, c, g, or t
  misc_feature (369)..(369): n is a, c, g, or t
  misc_feature (372)..(372): n is a, c, g, or t
  misc_feature (375)..(375): n is a, c, g, or t
  misc_feature (381)..(381): n is a, c, g, or t
  misc_feature (387)..(387): n is a, c, g, or t
  misc_feature (390)..(390): n is a, c, g, or t
  misc_feature (393)..(393): n is a, c, g, or t
  misc_feature (396)..(396): n is a, c, g, or t
  misc_feature (399)..(399): n is a, c, g, or t
  misc_feature (402)..(402): n is a, c, g, or t
  misc_feature (405)..(405): n is a, c, g, or t
  misc_feature (408)..(408): n is a, c, g, or t
  misc_feature (411)..(411): n is a, c, g, or t
  misc_feature (423)..(423): n is a, c, g, or t
  misc_feature (429)..(429): n is a, c, g, or t
  misc_feature (432)..(432): n is a, c, g, or t
  misc_feature (435)..(435): n is a, c, g, or t
  misc_feature (441)..(441): n is a, c, g, or t
  misc_feature (444)..(444): n is a, c, g, or t
  misc_feature (450)..(450): n is a, c, g, or t
  misc_feature (459)..(459): n is a, c, g, or t
  misc_feature (471)..(471): n is a, c, g, or t
  misc_feature (474)..(474): n is a, c, g, or t
  misc_feature (477)..(477): n is a, c, g, or t
  misc_feature (486)..(486): n is a, c, g, or t
  misc_feature (495)..(495): n is a, c, g, or t
  misc_feature (498)..(498): n is a, c, g, or t
  misc_feature (507)..(507): n is a, c, g, or t
  misc_feature (510)..(510): n is a, c, g, or t
  misc_feature (516)..(516): n is a, c, g, or t
  misc_feature (519)..(519): n is a, c, g, or t
  misc_feature (522)..(522): n is a, c, g, or t
  misc_feature (528)..(528): n is a, c, g, or t
  misc_feature (537)..(537): n is a, c, g, or t
  misc_feature (540)..(540): n is a, c, g, or t
  misc_feature (543)..(543): n is a, c, g, or t
  misc_feature (546)..(546): n is a, c, g, or t
  misc_feature (549)..(549): n is a, c, g, or t
  misc_feature (552)..(552): n is a, c, g, or t
  misc_feature (561)..(561): n is a, c, g, or t
  misc_feature (567)..(567): n is a, c, g, or t
  misc_feature (570)..(570): n is a, c, g, or t
  misc_feature (576)..(576): n is a, c, g, or t
  misc_feature (585)..(585): n is a, c, g, or t
  misc_feature (588)..(588): n is a, c, g, or t
  misc_feature (591)..(591): n is a, c, g, or t
  misc_feature (597)..(597): n is a, c, g, or t
  misc_feature (600)..(600): n is a, c, g, or t
  misc_feature (606)..(606): n is a, c, g, or t
  misc_feature (609)..(609): n is a, c, g, or t
  misc_feature (612)..(612): n is a, c, g, or t
  misc_feature (615)..(615): n is a, c, g, or t
  misc_feature (618)..(618): n is a, c, g, or t
  misc_feature (627)..(627): n is a, c, g, or t
  misc_feature (630)..(630): n is a, c, g, or t
  misc_feature (636)..(636): n is a, c, g, or t
  misc_feature (642)..(642): n is a, c, g, or t
  misc_feature (645)..(645): n is a, c, g, or t
  misc_feature (651)..(651): n is a, c, g, or t
  misc_feature (663)..(663): n is a, c, g, or t
  misc_feature (666)..(666): n is a, c, g, or t
  misc_feature (675)..(675): n is a, c, g, or t
  misc_feature (678)..(678): n is a, c, g, or t
  misc_feature (681)..(681): n is a, c, g, or t
  misc_feature (684)..(684): n is a, c, g, or t
  misc_feature (687)..(687): n is a, c, g, or t
  misc_feature (693)..(693): n is a, c, g, or t
  misc_feature (696)..(696): n is a, c, g, or t
  misc_feature (699)..(699): n is a, c, g, or t
  misc_feature (702)..(702): n is a, c, g, or t
  misc_feature (705)..(705): n is a, c, g, or t
  misc_feature (708)..(708): n is a, c, g, or t
  misc_feature (714)..(714): n is a, c, g, or t
  misc_feature (717)..(717): n is a, c, g, or t
  misc_feature (720)..(720): n is a, c, g, or t
  misc_feature (726)..(726): n is a, c, g, or t
  misc_feature (732)..(732): n is a, c, g, or t
  misc_feature (735)..(735): n is a, c, g, or t
  misc_feature (738)..(738): n is a, c, g, or t
  misc_feature (744)..(744): n is a, c, g, or t
  misc_feature (747)..(747): n is a, c, g, or t
  misc_feature (753)..(753): n is a, c, g, or t
  misc_feature (762)..(762): n is a, c, g, or t
  misc_feature (768)..(768): n is a, c, g, or t
  misc_feature (771)..(771): n is a, c, g, or t
  misc_feature (774)..(774): n is a, c, g, or t
  misc_feature (780)..(780): n is a, c, g, or t
  misc_feature (786)..(786): n is a, c, g, or t
  misc_feature (792)..(792): n is a, c, g, or t
  misc_feature (795)..(795): n is a, c, g, or t
  misc_feature (798)..(798): n is a, c, g, or t
  misc_feature (801)..(801): n is a, c, g, or t
  misc_feature (804)..(804): n is a, c, g, or t
  misc_feature (810)..(810): n is a, c, g, or t
  misc_feature (813)..(813): n is a, c, g, or t
  misc_feature (819)..(819): n is a, c, g, or t
  misc_feature (822)..(822): n is a, c, g, or t
  misc_feature (825)..(825): n is a, c, g, or t
  misc_feature (828)..(828): n is a, c, g, or t
  misc_feature (831)..(831): n is a, c, g, or t
  misc_feature (834)..(834): n is a, c, g, or t
  misc_feature (840)..(840): n is a, c, g, or t
  misc_feature (843)..(843): n is a, c, g, or t
  misc_feature (846)..(846): n is a, c, g, or t
  misc_feature (852)..(852): n is a, c, g, or t
  misc_feature (855)..(855): n is a, c, g, or t
  misc_feature (858)..(858): n is a, c, g, or t
  misc_feature (861)..(861): n is a, c, g, or t
  misc_feature (864)..(864): n is a, c, g, or t
  misc_feature (867)..(867): n is a, c, g, or t
  misc_feature (879)..(879): n is a, c, g, or t
  misc_feature (882)..(882): n is a, c, g, or t
  misc_feature (888)..(888): n is a, c, g, or t
  misc_feature (897)..(897): n is a, c, g, or t
  misc_feature (900)..(900): n is a, c, g, or t
  misc_feature (927)..(927): n is a, c, g, or t
  misc_feature (930)..(930): n is a, c, g, or t
  misc_feature (933)..(933): n is a, c, g, or t
  misc_feature (939)..(939): n is a, c, g, or t
  misc_feature (954)..(954): n is a, c, g, or t
  misc_feature (957)..(957): n is a, c, g, or t
  misc_feature (960)..(960): n is a, c, g, or t
  misc_feature (963)..(963): n is a, c, g, or t
  misc_feature (972)..(972): n is a, c, g, or t
  misc_feature (975)..(975): n is a, c, g, or t
  misc_feature (981)..(981): n is a, c, g, or t
  misc_feature (987)..(987): n is a, c, g, or t
  misc_feature (1020)..(1020): n is a, c, g, or t
  misc_feature (1026)..(1026): n is a, c, g, or t
  misc_feature (1029)..(1029): n is a, c, g, or t
  misc_feature (1032)..(1032): n is a, c, g, or t
  misc_feature (1038)..(1038): n is a, c, g, or t
  misc_feature (1041)..(1041): n is a, c, g, or t
  misc_feature (1050)..(1050): n is a, c, g, or t
  misc_feature (1053)..(1053): n is a, c, g, or t
  misc_feature (1068)..(1068): n is a, c, g, or t
  misc_feature (1071)..(1071): n is a, c, g, or t
  misc_feature (1080)..(1080): n is a, c, g, or t
  misc_feature (1095)..(1095): n is a, c, g, or t
  misc_feature (1098)..(1098): n is a, c, g, or t
  misc_feature (1104)..(1104): n is a, c, g, or t
  misc_feature (1107)..(1107): n is a, c, g, or t
  misc_feature (1110)..(1110): n is a, c, g, or t
  misc_feature (1113)..(1113): n is a, c, g, or t
  misc_feature (1116)..(1116): n is a, c, g, or t
  misc_feature (1119)..(1119): n is a, c, g, or t
  misc_feature (1122)..(1122): n is a, c, g, or t
  misc_feature (1125)..(1125): n is a, c, g, or t
  misc_feature (1131)..(1131): n is a, c, g, or t
  misc_feature (1137)..(1137): n is a, c, g, or t
  misc_feature (1140)..(1140): n is a, c, g, or t
  misc_feature (1143)..(1143): n is a, c, g, or t
  misc_feature (1146)..(1146): n is a, c, g, or t
  misc_feature (1164)..(1164): n is a, c, g, or t
  misc_feature (1167)..(1167): n is a, c, g, or t
  misc_feature (1170)..(1170): n is a, c, g, or t
  misc_feature (1173)..(1173): n is a, c, g, or t
  misc_feature (1176)..(1176): n is a, c, g, or t
  misc_feature (1179)..(1179): n is a, c, g, or t
  misc_feature (1182)..(1182): n is a, c, g, or t
  misc_feature (1188)..(1188): n is a, c, g, or t
  misc_feature (1197)..(1197): n is a, c, g, or t
  misc_feature (1206)..(1206): n is a, c, g, or t
  misc_feature (1209)..(1209): n is a, c, g, or t
  misc_feature (1212)..(1212): n is a, c, g, or t
  misc_feature (1218)..(1218): n is a, c, g, or t
  misc_feature (1224)..(1224): n is a, c, g, or t
  misc_feature (1239)..(1239): n is a, c, g, or t
  misc_feature (1242)..(1242): n is a, c, g, or t
  misc_feature (1245)..(1245): n is a, c, g, or t
  misc_feature (1251)..(1251): n is a, c, g, or t
  misc_feature (1254)..(1254): n is a, c, g, or t
  misc_feature (1263)..(1263): n is a, c, g, or t
  misc_feature (1275)..(1275): n is a, c, g, or t
  misc_feature (1278)..(1278): n is a, c, g, or t
  misc_feature (1284)..(1284): n is a, c, g, or t
  misc_feature (1287)..(1287): n is a, c, g, or t
  misc_feature (1293)..(1293): n is a, c, g, or t
  misc_feature (1311)..(1311): n is a, c, g, or t
  misc_feature (1314)..(1314): n is a, c, g, or t
  misc_feature (1320)..(1320): n is a, c, g, or t
  misc_feature (1323)..(1323): n is a, c, g, or t
  misc_feature (1326)..(1326): n is a, c, g, or t
  misc_feature (1329)..(1329): n is a, c, g, or t
  misc_feature (1332)..(1332): n is a, c, g, or t
  misc_feature (1335)..(1335): n is a, c, g, or t
  misc_feature (1338)..(1338): n is a, c, g, or t
  misc_feature (1341)..(1341): n is a, c, g, or t
  misc_feature (1344)..(1344): n is a, c, g, or t
  misc_feature (1347)..(1347): n is a, c, g, or t
  misc_feature (1353)..(1353): n is a, c, g, or t
  misc_feature (1356)..(1356): n is a, c, g, or t
  misc_feature (1359)..(1359): n is a, c, g, or t
  misc_feature (1362)..(1362): n is a, c, g, or t
  misc_feature (1365)..(1365): n is a, c, g, or t
  misc_feature (1368)..(1368): n is a, c, g, or t
  misc_feature (1374)..(1374): n is a, c, g, or t
  misc_feature (1377)..(1377): n is a, c, g, or t
  misc_feature (1383)..(1383): n is a, c, g, or t
  misc_feature (1386)..(1386): n is a, c, g, or t
  misc_feature (1389)..(1389): n is a, c, g, or t
  misc_feature (1392)..(1392): n is a, c, g, or t
  misc_feature (1395)..(1395): n is a, c, g, or t
  misc_feature (1401)..(1401): n is a, c, g, or t
  misc_feature (1404)..(1404): n is a, c, g, or t
  misc_feature (1407)..(1407): n is a, c, g, or t
  misc_feature (1416)..(1416): n is a, c, g, or t
  misc_feature (1419)..(1419): n is a, c, g, or t
  misc_feature (1425)..(1425): n is a, c, g, or t
  misc_feature (1428)..(1428): n is a, c, g, or t
  misc_feature (1434)..(1434): n is a, c, g, or t
  misc_feature (1440)..(1440): n is a, c, g, or t
  misc_feature (1443)..(1443): n is a, c, g, or t
  misc_feature (1446)..(1446): n is a, c, g, or t
  misc_feature (1449)..(1449): n is a, c, g, or t
  misc_feature (1455)..(1455): n is a, c, g, or t
  misc_feature (1458)..(1458): n is a, c, g, or t
  misc_feature (1461)..(1461): n is a, c, g, or t
  misc_feature (1467)..(1467): n is a, c, g, or t
  misc_feature (1470)..(1470): n is a, c, g, or t
  misc_feature (1479)..(1479): n is a, c, g, or t
  misc_feature (1482)..(1482): n is a, c, g, or t
  misc_feature (1485)..(1485): n is a, c, g, or t
  misc_feature (1488)..(1488): n is a, c, g, or t
  misc_feature (1491)..(1491): n is a, c, g, or t
  misc_feature (1494)..(1494): n is a, c, g, or t
  misc_feature (1500)..(1500): n is a, c, g, or t
  misc_feature (1503)..(1503): n is a, c, g, or t
  misc_feature (1506)..(1506): n is a, c, g, or t
  misc_feature (1509)..(1509): n is a, c, g, or t
  misc_feature (1512)..(1512): n is a, c, g, or t
  misc_feature (1515)..(1515): n is a, c, g, or t
  misc_feature (1518)..(1518): n is a, c, g, or t
  misc_feature (1521)..(1521): n is a, c, g, or t
  misc_feature (1524)..(1524): n is a, c, g, or t
  misc_feature (1527)..(1527): n is a, c, g, or t
  misc_feature (1530)..(1530): n is a, c, g, or t
  misc_feature (1533)..(1533): n is a, c, g, or t
  misc_feature (1536)..(1536): n is a, c, g, or t
  misc_feature (1539)..(1539): n is a, c, g, or t
  misc_feature (1542)..(1542): n is a, c, g, or t
  misc_feature (1554)..(1554): n is a, c, g, or t
  misc_feature (1557)..(1557): n is a, c, g, or t
  misc_feature (1566)..(1566): n is a, c, g, or t
  misc_feature (1569)..(1569): n is a, c, g, or t
  misc_feature (1572)..(1572): n is a, c, g, or t
  misc_feature (1575)..(1575): n is a, c, g, or t
  misc_feature (1581)..(1581): n is a, c, g, or t
  misc_feature (1584)..(1584): n is a, c, g, or t
  misc_feature (1590)..(1590): n is a, c, g, or t
  misc_feature (1593)..(1593): n is a, c, g, or t
  misc_feature (1596)..(1596): n is a, c, g, or t
  misc_feature (1599)..(1599): n is a, c, g, or t
  misc_feature (1605)..(1605): n is a, c, g, or t
  misc_feature (1611)..(1611): n is a, c, g, or t
  misc_feature (1614)..(1614): n is a, c, g, or t
  misc_feature (1617)..(1617): n is a, c, g, or t
  misc_feature (1620)..(1620): n is a, c, g, or t
  misc_feature (1629)..(1629): n is a, c, g, or t
  misc_feature (1632)..(1632): n is a, c, g, or t
  misc_feature (1638)..(1638): n is a, c, g, or t
  misc_feature (1641)..(1641): n is a, c, g, or t
  misc_feature (1644)..(1644): n is a, c, g, or t
  misc_feature (1647)..(1647): n is a, c, g, or t
  misc_feature (1650)..(1650): n is a, c, g, or t
  misc_feature (1653)..(1653): n is a, c, g, or t
  misc_feature (1656)..(1656): n is a, c, g, or t
  misc_feature (1662)..(1662): n is a, c, g, or t
  misc_feature (1665)..(1665): n is a, c, g, or t
  misc_feature (1668)..(1668): n is a, c, g, or t
  misc_feature (1671)..(1671): n is a, c, g, or t
  misc_feature (1677)..(1677): n is a, c, g, or t
  misc_feature (1689)..(1689): n is a, c, g, or t
  misc_feature (1695)..(1695): n is a, c, g, or t
  misc_feature (1698)..(1698): n is a, c, g, or t
  misc_feature (1701)..(1701): n is a, c, g, or t
  misc_feature (1704)..(1704): n is a, c, g, or t
  misc_feature (1713)..(1713): n is a, c, g, or t
  misc_feature (1716)..(1716): n is a, c, g, or t
  misc_feature (1722)..(1722): n is a, c, g, or t
  misc_feature (1725)..(1725): n is a, c, g, or t
  misc_feature (1731)..(1731): n is a, c, g, or t
  misc_feature (1734)..(1734): n is a, c, g, or t
  misc_feature (1737)..(1737): n is a, c, g, or t
  misc_feature (1740)..(1740): n is a, c, g, or t
  misc_feature (1743)..(1743): n is a, c, g, or t
  misc_feature (1746)..(1746): n is a, c, g, or t
  misc_feature (1752)..(1752): n is a, c, g, or t
  misc_feature (1755)..(1755): n is a, c, g, or t
  misc_feature (1761)..(1761): n is a, c, g, or t
  misc_feature (1776)..(1776): n is a, c, g, or t
  misc_feature (1779)..(1779): n is a, c, g, or t
  misc_feature (1782)..(1782): n is a, c, g, or t
  misc_feature (1788)..(1788): n is a, c, g, or t
  misc_feature (1791)..(1791): n is a, c, g, or t
  misc_feature (1797)..(1797): n is a, c, g, or t
  misc_feature (1800)..(1800): n is a, c, g, or t
  misc_feature (1803)..(1803): n is a, c, g, or t
  misc_feature (1809)..(1809): n is a, c, g, or t
  misc_feature (1812)..(1812): n is a, c, g, or t
  misc_feature (1815)..(1815): n is a, c, g, or t
  misc_feature (1818)..(1818): n is a, c, g, or t
  misc_feature (1824)..(1824): n is a, c, g, or t
  misc_feature (1827)..(1827): n is a, c, g, or t
  misc_feature (1833)..(1833): n is a, c, g, or t
  misc_feature (1839)..(1839): n is a, c, g, or t
  misc_feature (1842)..(1842): n is a, c, g, or t
  misc_feature (1845)..(1845): n is a, c, g, or t
  misc_feature (1854)..(1854): n is a, c, g, or t
  misc_feature (1857)..(1857): n is a, c, g, or t
  misc_feature (1866)..(1866): n is a, c, g, or t
  misc_feature (1875)..(1875): n is a, c, g, or t
  misc_feature (1881)..(1881): n is a, c, g, or t
  misc_feature (1884)..(1884): n is a, c, g, or t
  misc_feature (1887)..(1887): n is a, c, g, or t
  misc_feature (1890)..(1890): n is a, c, g, or t
  misc_feature (1905)..(1905): n is a, c, g, or t
  misc_feature (1911)..(1911): n is a, c, g, or t
  misc_feature (1914)..(1914): n is a, c, g, or t
  misc_feature (1923)..(1923): n is a, c, g, or t
  misc_feature (1926)..(1926): n is a, c, g, or t
  misc_feature (1932)..(1932): n is a, c, g, or t
  misc_feature (1944)..(1944): n is a, c, g, or t
  misc_feature (1950)..(1950): n is a, c, g, or t
  misc_feature (1953)..(1953): n is a, c, g, or t
  misc_feature (1956)..(1956): n is a, c, g, or t
  misc_feature (1959)..(1959): n is a, c, g, or t
  misc_feature (1962)..(1962): n is a, c, g, or t
  misc_feature (1965)..(1965): n is a, c, g, or t
  misc_feature (1974)..(1974): n is a, c, g, or t
  misc_feature (1977)..(1977): n is a, c, g, or t
  misc_feature (1986)..(1986): n is a, c, g, or t
  misc_feature (1992)..(1992): n is a, c, g, or t
  misc_feature (1998)..(1998): n is a, c, g, or t
  misc_feature (2010)..(2010): n is a, c, g, or t
  misc_feature (2019)..(2019): n is a, c, g, or t
  misc_feature (2025)..(2025): n is a, c, g, or t
  misc_feature (2028)..(2028): n is a, c, g, or t
  misc_feature (2037)..(2037): n is a, c, g, or t
  misc_feature (2046)..(2046): n is a, c, g, or t
  misc_feature (2058)..(2058): n is a, c, g, or t
  misc_feature (2061)..(2061): n is a, c, g, or t
  misc_feature (2064)..(2064): n is a, c, g, or t
  misc_feature (2070)..(2070): n is a, c, g, or t
  misc_feature (2082)..(2082): n is a, c, g, or t
  misc_feature (2097)..(2097): n is a, c, g, or t
  misc_feature (2106)..(2106): n is a, c, g, or t
  misc_feature (2115)..(2115): n is a, c, g, or t
  misc_feature (2118)..(2118): n is a, c, g, or t
  misc_feature (2121)..(2121): n is a, c, g, or t
  misc_feature (2127)..(2127): n is a, c, g, or t
  misc_feature (2133)..(2133): n is a, c, g, or t
  misc_feature (2148)..(2148): n is a, c, g, or t
  misc_feature (2163)..(2163): n is a, c, g, or t
  misc_feature (2172)..(2172): n is a, c, g, or t
  misc_feature (2181)..(2181): n is a, c, g, or t
  misc_feature (2184)..(2184): n is a, c, g, or t
  misc_feature (2187)..(2187): n is a, c, g, or t
  misc_feature (2190)..(2190): n is a, c, g, or t
  misc_feature (2199)..(2199): n is a, c, g, or t
  misc_feature (2205)..(2205): n is a, c, g, or t
  misc_feature (2226)..(2226): n is a, c, g, or t
  misc_feature (2235)..(2235): n is a, c, g, or t
  misc_feature (2247)..(2247): n is a, c, g, or t
  misc_feature (2259)..(2259): n is a, c, g, or t
  misc_feature (2262)..(2262): n is a, c, g, or t
  misc_feature (2268)..(2268): n is a, c, g, or t
  misc_feature (2271)..(2271): n is a, c, g, or t
  misc_feature (2277)..(2277): n is a, c, g, or t
  misc_feature (2283)..(2283): n is a, c, g, or t
  misc_feature (2286)..(2286): n is a, c, g, or t
  misc_feature (2292)..(2292): n is a, c, g, or t
  misc_feature (2298)..(2298): n is a, c, g, or t
  misc_feature (2307)..(2307): n is a, c, g, or t
  misc_feature (2313)..(2313): n is a, c, g, or t
  misc_feature (2316)..(2316): n is a, c, g, or t
  misc_feature (2319)..(2319): n is a, c, g, or t
  misc_feature (2331)..(2331): n is a, c, g, or t
  misc_feature (2337)..(2337): n is a, c, g, or t
  misc_feature (2340)..(2340): n is a, c, g, or t
  misc_feature (2346)..(2346): n is a, c, g, or t
  misc_feature (2349)..(2349): n is a, c, g, or t
  misc_feature (2352)..(2352): n is a, c, g, or t
  misc_feature (2355)..(2355): n is a, c, g, or t
  misc_feature (2361)..(2361): n is a, c, g, or t
  misc_feature (2370)..(2370): n is a, c, g, or t
  misc_feature (2382)..(2382): n is a, c, g, or t
  misc_feature (2388)..(2388): n is a, c, g, or t
  misc_feature (2391)..(2391): n is a, c, g, or t
  misc_feature (2394)..(2394): n is a, c, g, or t
  misc_feature (2403)..(2403): n is a, c, g, or t
  misc_feature (2409)..(2409): n is a, c, g, or t
  misc_feature (2412)..(2412): n is a, c, g, or t
  misc_feature (2415)..(2415): n is a, c, g, or t
  misc_feature (2418)..(2418): n is a, c, g, or t
  misc_feature (2433)..(2433): n is a, c, g, or t
  misc_feature (2436)..(2436): n is a, c, g, or t
  misc_feature (2445)..(2445): n is a, c, g, or t
atgccnwsntgggcnytnttyatggtnacnwsntgyytnytnytngcnccncaraayytngcncargtnwsnwsncargaygtnwsnytnytngcnwsngaywsngarccnytnaartgyttywsnmgnacnttygargayytnacntgyttytgggaygargargargcngcnccnwsnggnacntaycarytnytntaygcntayccnmgngaraarccnmgngcntgyccnytnwsnwsncarwsnatgccncayttyggnacnmgntaygtntgycarttyccngaycargargargtnmgnytnttyttyccnytncayytntgggtnaaraaygtnttyytnaaycaracnmgnacncarmgngtnytnttygtngaywsngtnggnytnccngcnccnccnwsnathathaargcnatgggnggnwsncarccnggngarytncarathwsntgggargarccngcnccngarathwsngayttyytnmgntaygarytnmgntayggnccnmgngayccnaaraaywsnacnggnccnacngtnathcarytnathgcnacngaracntgytgyccngcnytncarmgnccncaywsngcnwsngcnytngaycarwsnccntgygcncarccnacnatgccntggcargayggnccnaarcaracnwsnccnwsnmgngargcnwsngcnytnacngcngarggnggnwsntgyytnathwsnggnytncarccnggnaaywsntaytggytncarytnmgnwsngarccngayggnathwsnytnggnggnwsntggggnwsntggwsnytnccngtnacngtngayytnccnggngaygcngtngcnytnggnytncartgyttyacnytngayytnaaraaygtnacntgycartggcarcarcargaycaygcnwsnwsncarggnttyttytaycaywsnmgngcnmgntgytgyccnmgngaymgntayccnathtgggaraaytgygargargargaraaracnaayccnggnytncaracnccncarttywsnmgntgycayttyaarwsnmgnaaygaywsnathathcayathytngtngargtnacnacngcnccnggnacngtncaywsntayytnggnwsnccnttytggathcaycargcngtnmgnytnccnacnccnaayytncaytggmgngarathwsnwsnggncayytngarytngartggcarcayccnwsnwsntgggcngcncargaracntgytaycarytnmgntayacnggngarggncaycargaytggaargtnytngarccnccnytnggngcnmgnggnggnacnytngarytnmgnccnmgnwsnmgntaymgnytncarytnmgngcnmgnytnaayggnccnacntaycarggnccntggwsnwsntggwsngayccnacnmgngtngaracngcnacngaracngcntggathwsnytngtnacngcnytncayytngtnytnggnytnwsngcngtnytnggnytnytnytnytnmgntggcarttyccngcncaytaymgnmgnytnmgncaygcnytntggccnwsnytnccngayytncaymgngtnytnggncartayytnmgngayacngcngcnytnwsnccnccnaargcnacngtnwsngayacntgygargargtngarccnwsnytnytngarathytnccnaarwsnwsngarmgnacnccnytnccnytntgywsnwsncargcncaratggaytaymgnmgnytncarccnwsntgyytnggnacnatgccnytnwsngtntgyccnccnatggcngarwsnggnwsntgytgyacnacncayathgcnaaycaywsntayytnccnytnwsntaytggcarcarccngayytnccntggtayytnmgnatggtntgycartggacncaracnmgnmgnmgngcnmgnaayathccnytngargarytncarmgnaayytncarttycaygcnttyathwsntaywsnggncaygaywsnttytgggtnaaraaygarytnytnccnaayytngaraargarggnatgcarathtgyytncaygarmgnaayttygtnccnggnaarwsnathgtngaraayathathacntgyathgaraarwsntayaarwsnathttygtnytnwsnccnaayttygtncarwsngartggtgycaytaygarytntayttygcncaycayaayytnttycaygarggnwsnaaywsnytnathytnathytnytngarccnathccncartaywsnathccnwsnwsntaycayaarytnaarwsnytnatggcnmgnmgnacntayytngartggccnaargaraarwsnaarmgnggnytnttytgggcnaayytnmgngcngcnathaayathaarytnacngarcargcnaaraartrrtrr

SEQ ID NO: 22 - DNA, 2256 bp, Artificial Sequence
  TpoR-TIAF1
  misc_feature (6)..(6): n is a, c, g, or t
  misc_feature (9)..(9): n is a, c, g, or t
  misc_feature (15)..(15): n is a, c, g, or t
  misc_feature (18)..(18): n is a, c, g, or t
  misc_feature (27)..(27): n is a, c, g, or t
  misc_feature (30)..(30): n is a, c, g, or t
  misc_feature (33)..(33): n is a, c, g, or t
  misc_feature (39)..(39): n is a, c, g, or t
  misc_feature (42)..(42): n is a, c, g, or t
  misc_feature (45)..(45): n is a, c, g, or t
  misc_feature (48)..(48): n is a, c, g, or t
  misc_feature (51)..(51): n is a, c, g, or t
  misc_feature (60)..(60): n is a, c, g, or t
  misc_feature (63)..(63): n is a, c, g, or t
  misc_feature (69)..(69): n is a, c, g, or t
  misc_feature (72)..(72): n is a, c, g, or t
  misc_feature (75)..(75): n is a, c, g, or t
  misc_feature (84)..(84): n is a, c, g, or t
  misc_feature (87)..(87): n is a, c, g, or t
  misc_feature (90)..(90): n is a, c, g, or t
  misc_feature (93)..(93): n is a, c, g, or t
  misc_feature (96)..(96): n is a, c, g, or t
  misc_feature (99)..(99): n is a, c, g, or t
  misc_feature (105)..(105): n is a, c, g, or t
  misc_feature (111)..(111): n is a, c, g, or t
  misc_feature (114)..(114): n is a, c, g, or t
  misc_feature (126)..(126): n is a, c, g, or t
  misc_feature (129)..(129): n is a, c, g, or t
  misc_feature (132)..(132): n is a, c, g, or t
  misc_feature (144)..(144): n is a, c, g, or t
  misc_feature (147)..(147): n is a, c, g, or t
  misc_feature (171)..(171): n is a, c, g, or t
  misc_feature (174)..(174): n is a, c, g, or t
  misc_feature (177)..(177): n is a, c, g, or t
  misc_feature (180)..(180): n is a, c, g, or t
  misc_feature (183)..(183): n is a, c, g, or t
  misc_feature (186)..(186): n is a, c, g, or t
  misc_feature (195)..(195): n is a, c, g, or t
  misc_feature (198)..(198): n is a, c, g, or t
  misc_feature (204)..(204): n is a, c, g, or t
  misc_feature (210)..(210): n is a, c, g, or t
  misc_feature (213)..(213): n is a, c, g, or t
  misc_feature (222)..(222): n is a, c, g, or t
  misc_feature (225)..(225): n is a, c, g, or t
  misc_feature (228)..(228): n is a, c, g, or t
  misc_feature (234)..(234): n is a, c, g, or t
  misc_feature (237)..(237): n is a, c, g, or t
  misc_feature (240)..(240): n is a, c, g, or t
  misc_feature (243)..(243): n is a, c, g, or t
  misc_feature (249)..(249): n is a, c, g, or t
  misc_feature (255)..(255): n is a, c, g, or t
  misc_feature (264)..(264): n is a, c, g, or t
  misc_feature (267)..(267): n is a, c, g, or t
  misc_feature (270)..(270): n is a, c, g, or t
  misc_feature (276)..(276): n is a, c, g, or t
  misc_feature (288)..(288): n is a, c, g, or t
  misc_feature (303)..(303): n is a, c, g, or t
  misc_feature (306)..(306): n is a, c, g, or t
  misc_feature (309)..(309): n is a, c, g, or t
  misc_feature (318)..(318): n is a, c, g, or t
  misc_feature (321)..(321): n is a, c, g, or t
  misc_feature (327)..(327): n is a, c, g, or t
  misc_feature (333)..(333): n is a, c, g, or t
  misc_feature (342)..(342): n is a, c, g, or t
  misc_feature (348)..(348): n is a, c, g, or t
  misc_feature (357)..(357): n is a, c, g, or t
  misc_feature (360)..(360): n is a, c, g, or t
  misc_feature (363)..(363): n is a, c, g, or t
  misc_feature (369)..(369): n is a, c, g, or t
  misc_feature (372)..(372): n is a, c, g, or t
  misc_feature (375)..(375): n is a, c, g, or t
  misc_feature (381)..(381): n is a, c, g, or t
  misc_feature (387)..(387): n is a, c, g, or t
  misc_feature (390)..(390): n is a, c, g, or t
  misc_feature (393)..(393): n is a, c, g, or t
  misc_feature (396)..(396): n is a, c, g, or t
  misc_feature (399)..(399): n is a, c, g, or t
  misc_feature (402)..(402): n is a, c, g, or t
  misc_feature (405)..(405): n is a, c, g, or t
  misc_feature (408)..(408): n is a, c, g, or t
  misc_feature (411)..(411): n is a, c, g, or t
  misc_feature (423)..(423): n is a, c, g, or t
  misc_feature (429)..(429): n is a, c, g, or t
  misc_feature (432)..(432): n is a, c, g, or t
  misc_feature (435)..(435): n is a, c, g, or t
  misc_feature (441)..(441): n is a, c, g, or t
  misc_feature (444)..(444): n is a, c, g, or t
  misc_feature (450)..(450): n is a, c, g, or t
  misc_feature (459)..(459): n is a, c, g, or t
  misc_feature (471)..(471): n is a, c, g, or t
  misc_feature (474)..(474): n is a, c, g, or t
  misc_feature (477)..(477): n is a, c, g, or t
  misc_feature (486)..(486): n is a, c, g, or t
  misc_feature (495)..(495): n is a, c, g, or t
  misc_feature (498)..(498): n is a, c, g, or t
  misc_feature (507)..(507): n is a, c, g, or t
  misc_feature (510)..(510): n is a, c, g, or t
  misc_feature (516)..(516): n is a, c, g, or t
  misc_feature (519)..(519): n is a, c, g, or t
  misc_feature (522)..(522): n is a, c, g, or t
  misc_feature (528)..(528): n is a, c, g, or t
  misc_feature (537)..(537): n is a, c, g, or t
  misc_feature (540)..(540): n is a, c, g, or t
  misc_feature (543)..(543): n is a, c, g, or t
  misc_feature (546)..(546): n is a, c, g, or t
  misc_feature (549)..(549): n is a, c, g, or t
  misc_feature (552)..(552): n is a, c, g, or t
  misc_feature (561)..(561): n is a, c, g, or t
  misc_feature (567)..(567): n is a, c, g, or t
  misc_feature (570)..(570): n is a, c, g, or t
  misc_feature (576)..(576): n is a, c, g, or t
  misc_feature (585)..(585): n is a, c, g, or t
  misc_feature (588)..(588): n is a, c, g, or t
  misc_feature (591)..(591): n is a, c, g, or t
  misc_feature (597)..(597): n is a, c, g, or t
  misc_feature (600)..(600): n is a, c, g, or t
  misc_feature (606)..(606): n is a, c, g, or t
  misc_feature (609)..(609): n is a, c, g, or t
  misc_feature (612)..(612): n is a, c, g, or t
  misc_feature (615)..(615): n is a, c, g, or t
  misc_feature (618)..(618): n is a, c, g, or t
  misc_feature (627)..(627): n is a, c, g, or t
  misc_feature (630)..(630): n is a, c, g, or t
  misc_feature (636)..(636): n is a, c, g, or t
  misc_feature (642)..(642): n is a, c, g, or t
  misc_feature (645)..(645): n is a, c, g, or t
  misc_feature (651)..(651): n is a, c, g, or t
  misc_feature (663)..(663): n is a, c, g, or t
  misc_feature (666)..(666): n is a, c, g, or t
  misc_feature (675)..(675): n is a, c, g, or t
  misc_feature (678)..(678): n is a, c, g, or t
  misc_feature (681)..(681): n is a, c, g, or t
  misc_feature (684)..(684): n is a, c, g, or t
  misc_feature (687)..(687): n is a, c, g, or t
  misc_feature (693)..(693): n is a, c, g, or t
  misc_feature (696)..(696): n is a, c, g, or t
  misc_feature (699)..(699): n is a, c, g, or t
  misc_feature (702)..(702): n is a, c, g, or t
  misc_feature (705)..(705): n is a, c, g, or t
  misc_feature (708)..(708): n is a, c, g, or t
  misc_feature (714)..(714): n is a, c, g, or t
  misc_feature (717)..(717): n is a, c, g, or t
  misc_feature (720)..(720): n is a, c, g, or t
  misc_feature (726)..(726): n is a, c, g, or t
  misc_feature (732)..(732): n is a, c, g, or t
  misc_feature (735)..(735): n is a, c, g, or t
  misc_feature (738)..(738): n is a, c, g, or t
  misc_feature (744)..(744): n is a, c, g, or t
  misc_feature (747)..(747): n is a, c, g, or t
  misc_feature (753)..(753): n is a, c, g, or t
  misc_feature (762)..(762): n is a, c, g, or t
  misc_feature (768)..(768): n is a, c, g, or t
  misc_feature (771)..(771): n is a, c, g, or t
  misc_feature (774)..(774): n is a, c, g, or t
  misc_feature (780)..(780): n is a, c, g, or t
  misc_feature (786)..(786): n is a, c, g, or t
  misc_feature (792)..(792): n is a, c, g, or t
  misc_feature (795)..(795): n is a, c, g, or t
  misc_feature (798)..(798): n is a, c, g, or t
  misc_feature (801)..(801): n is a, c, g, or t
  misc_feature (804)..(804): n is a, c, g, or t
  misc_feature (810)..(810): n is a, c, g, or t
  misc_feature (813)..(813): n is a, c, g, or t
  misc_feature (819)..(819): n is a, c, g, or t
  misc_feature (822)..(822): n is a, c, g, or t
  misc_feature (825)..(825): n is a, c, g, or t
  misc_feature (828)..(828): n is a, c, g, or t
  misc_feature (831)..(831): n is a, c, g, or t
  misc_feature (834)..(834): n is a, c, g, or t
  misc_feature (840)..(840): n is a, c, g, or t
  misc_feature (843)..(843): n is a, c, g, or t
  misc_feature (846)..(846): n is a, c, g, or t
  misc_feature (852)..(852): n is a, c, g, or t
  misc_feature (855)..(855): n is a, c, g, or t
  misc_feature (858)..(858): n is a, c, g, or t
  misc_feature (861)..(861): n is a, c, g, or t
  misc_feature (864)..(864): n is a, c, g, or t
  misc_feature (867)..(867): n is a, c, g, or t
  misc_feature (879)..(879): n is a, c, g, or t
  misc_feature (882)..(882): n is a, c, g, or t
  misc_feature (888)..(888): n is a, c, g, or t
  misc_feature (897)..(897): n is a, c, g, or t
  misc_feature (900)..(900): n is a, c, g, or t
  misc_feature (927)..(927): n is a, c, g, or t
  misc_feature (930)..(930): n is a, c, g, or t
  misc_feature (933)..(933): n is a, c, g, or t
  misc_feature (939)..(939): n is a, c, g, or t
  misc_feature (954)..(954): n is a, c, g, or t
  misc_feature (957)..(957): n is a, c, g, or t
  misc_feature (960)..(960): n is a, c, g, or t
  misc_feature (963)..(963): n is a, c, g, or t
  misc_feature (972)..(972): n is a, c, g, or t
  misc_feature (975)..(975): n is a, c, g, or t
  misc_feature (981)..(981): n is a, c, g, or t
  misc_feature (987)..(987): n is a, c, g, or t
  misc_feature (1020)..(1020): n is a, c, g, or t
  misc_feature (1026)..(1026): n is a, c, g, or t
  misc_feature (1029)..(1029): n is a, c, g, or t
  misc_feature (1032)..(1032): n is a, c, g, or t
  misc_feature (1038)..(1038): n is a, c, g, or t
  misc_feature (1041)..(1041): n is a, c, g, or t
  misc_feature (1050)..(1050): n is a, c, g, or t
  misc_feature (1053)..(1053): n is a, c, g, or t
  misc_feature (1068)..(1068): n is a, c, g, or t
  misc_feature (1071)..(1071): n is a, c, g, or t
  misc_feature (1080)..(1080): n is a, c, g, or t
  misc_feature (1095)..(1095): n is a, c, g, or t
  misc_feature (1098)..(1098): n is a, c, g, or t
  misc_feature (1104)..(1104): n is a, c, g, or t
  misc_feature (1107)..(1107): n is a, c, g, or t
  misc_feature (1110)..(1110): n is a, c, g, or t
  misc_feature (1113)..(1113): n is a, c, g, or t
  misc_feature (1116)..(1116): n is a, c, g, or t
  misc_feature (1119)..(1119): n is a, c, g, or t
  misc_feature (1122)..(1122): n is a, c, g, or t
  misc_feature (1125)..(1125): n is a, c, g, or t
  misc_feature (1131)..(1131): n is a, c, g, or t
  misc_feature (1137)..(1137): n is a, c, g, or t
  misc_feature (1140)..(1140): n is a, c, g, or t
  misc_feature (1143)..(1143): n is a, c, g, or t
  misc_feature (1146)..(1146): n is a, c, g, or t
  misc_feature (1164)..(1164): n is a, c, g, or t
  misc_feature (1167)..(1167): n is a, c, g, or t
  misc_feature (1170)..(1170): n is a, c, g, or t
  misc_feature (1173)..(1173): n is a, c, g, or t
  misc_feature (1176)..(1176): n is a, c, g, or t
  misc_feature (1179)..(1179): n is a, c, g, or t
  misc_feature (1182)..(1182): n is a, c, g, or t
  misc_feature (1188)..(1188): n is a, c, g, or t
  misc_feature (1197)..(1197): n is a, c, g, or t
  misc_feature (1206)..(1206): n is a, c, g, or t
  misc_feature (1209)..(1209): n is a, c, g, or t
  misc_feature (1212)..(1212): n is a, c, g, or t
  misc_feature (1218)..(1218): n is a, c, g, or t
  misc_feature (1224)..(1224): n is a, c, g, or t
  misc_feature (1239)..(1239): n is a, c, g, or t
  misc_feature (1242)..(1242): n is a, c, g, or t
  misc_feature (1245)..(1245): n is a, c, g, or t
  misc_feature (1251)..(1251): n is a, c, g, or t
  misc_feature (1254)..(1254): n is a, c, g, or t
  misc_feature (1263)..(1263): n is a, c, g, or t
  misc_feature (1275)..(1275): n is a, c, g, or t
  misc_feature (1278)..(1278): n is a, c, g, or t
  misc_feature (1284)..(1284): n is a, c, g, or t
  misc_feature (1287)..(1287): n is a, c, g, or t
  misc_feature (1293)..(1293): n is a, c, g, or t
  misc_feature (1311)..(1311): n is a, c, g, or t
  misc_feature (1314)..(1314): n is a, c, g, or t
  misc_feature (1320)..(1320): n is a, c, g, or t
  misc_feature (1323)..(1323): n is a, c, g, or t
  misc_feature (1326)..(1326): n is a, c, g, or t
  misc_feature (1329)..(1329): n is a, c, g, or t
  misc_feature (1332)..(1332): n is a, c, g, or t
  misc_feature (1335)..(1335): n is a, c, g, or t
  misc_feature (1338)..(1338): n is a, c, g, or t
  misc_feature (1341)..(1341): n is a, c, g, or t
  misc_feature (1344)..(1344): n is a, c, g, or t
  misc_feature (1347)..(1347): n is a, c, g, or t
  misc_feature (1353)..(1353): n is a, c, g, or t
  misc_feature (1356)..(1356): n is a, c, g, or t
  misc_feature (1359)..(1359): n is a, c, g, or t
  misc_feature (1362)..(1362): n is a, c, g, or t
  misc_feature (1365)..(1365): n is a, c, g, or t
  misc_feature (1368)..(1368): n is a, c, g, or t
  misc_feature (1374)..(1374): n is a, c, g, or t
  misc_feature (1377)..(1377): n is a, c, g, or t
  misc_feature (1383)..(1383): n is a, c, g, or t
  misc_feature (1386)..(1386): n is a, c, g, or t
  misc_feature (1389)..(1389): n is a, c, g, or t
  misc_feature (1392)..(1392): n is a, c, g, or t
  misc_feature (1395)..(1395): n is a, c, g, or t
  misc_feature (1401)..(1401): n is a, c, g, or t
  misc_feature (1404)..(1404): n is a, c, g, or t
  misc_feature (1407)..(1407): n is a, c, g, or t
  misc_feature (1416)..(1416): n is a, c, g, or t
  misc_feature (1419)..(1419): n is a, c, g, or t
  misc_feature (1425)..(1425): n is a, c, g, or t
  misc_feature (1428)..(1428): n is a, c, g, or t
  misc_feature (1434)..(1434): n is a, c, g, or t
  misc_feature (1440)..(1440): n is a, c, g, or t
  misc_feature (1443)..(1443): n is a, c, g, or t
  misc_feature (1446)..(1446): n is a, c, g, or t
  misc_feature (1449)..(1449): n is a, c, g, or t
  misc_feature (1455)..(1455): n is a, c, g, or t
  misc_feature (1458)..(1458): n is a, c, g, or t
  misc_feature (1461)..(1461): n is a, c, g, or t
  misc_feature (1467)..(1467): n is a, c, g, or t
  misc_feature (1470)..(1470): n is a, c, g, or t
  misc_feature (1479)..(1479): n is a, c, g, or t
  misc_feature (1482)..(1482): n is a, c, g, or t
  misc_feature (1485)..(1485): n is a, c, g, or t
  misc_feature (1488)..(1488): n is a, c, g, or t
  misc_feature (1491)..(1491): n is a, c, g, or t
  misc_feature (1494)..(1494): n is a, c, g, or t
  misc_feature (1500)..(1500): n is a, c, g, or t
  misc_feature (1503)..(1503): n is a, c, g, or t
  misc_feature (1506)..(1506): n is a, c, g, or t
  misc_feature (1509)..(1509): n is a, c, g, or t
  misc_feature (1512)..(1512): n is a, c, g, or t
  misc_feature (1515)..(1515): n is a, c, g, or t
  misc_feature (1518)..(1518): n is a, c, g, or t
  misc_feature (1521)..(1521): n is a, c, g, or t
  misc_feature (1524)..(1524): n is a, c, g, or t
  misc_feature (1527)..(1527): n is a, c, g, or t
  misc_feature (1530)..(1530): n is a, c, g, or t
  misc_feature (1533)..(1533): n is a, c, g, or t
  misc_feature (1536)..(1536): n is a, c, g, or t
  misc_feature (1539)..(1539): n is a, c, g, or t
  misc_feature (1542)..(1542): n is a, c, g, or t
  misc_feature (1554)..(1554): n is a, c, g, or t
  misc_feature (1557)..(1557): n is a, c, g, or t
  misc_feature (1566)..(1566): n is a, c, g, or t
  misc_feature (1569)..(1569): n is a, c, g, or t
  misc_feature (1572)..(1572): n is a, c, g, or t
  misc_feature (1575)..(1575): n is a, c, g, or t
  misc_feature (1581)..(1581): n is a, c, g, or t
  misc_feature (1584)..(1584): n is a, c, g, or t
  misc_feature (1590)..(1590): n is a, c, g, or t
  misc_feature (1593)..(1593): n is a, c, g, or t
  misc_feature (1596)..(1596): n is a, c, g, or t
  misc_feature (1599)..(1599): n is a, c, g, or t
  misc_feature (1605)..(1605): n is a, c, g, or t
  misc_feature (1611)..(1611): n is a, c, g, or t
  misc_feature (1614)..(1614): n is a, c, g, or t
  misc_feature (1617)..(1617): n is a, c, g, or t
  misc_feature (1620)..(1620): n is a, c, g, or t
  misc_feature (1629)..(1629): n is a, c, g, or t
  misc_feature (1632)..(1632): n is a, c, g, or t
  misc_feature (1638)..(1638): n is a, c, g, or t
  misc_feature (1641)..(1641): n is a, c, g, or t
  misc_feature (1644)..(1644): n is a, c, g, or t
  misc_feature (1647)..(1647): n is a, c, g, or t
  misc_feature (1650)..(1650): n is a, c, g, or t
  misc_feature (1653)..(1653): n is a, c, g, or t
  misc_feature (1656)..(1656): n is a, c, g, or t
  misc_feature (1662)..(1662): n is a, c, g, or t
  misc_feature (1665)..(1665): n is a, c, g, or t
  misc_feature (1668)..(1668): n is a, c, g, or t
  misc_feature (1671)..(1671): n is a, c, g, or t
  misc_feature (1677)..(1677): n is a, c, g, or t
  misc_feature (1689)..(1689): n is a, c, g, or t
  misc_feature (1695)..(1695): n is a, c, g, or t
  misc_feature (1698)..(1698): n is a, c, g, or t
  misc_feature (1701)..(1701): n is a, c, g, or t
  misc_feature (1704)..(1704): n is a, c, g, or t
  misc_feature (1713)..(1713): n is a, c, g, or t
  misc_feature (1716)..(1716): n is a, c, g, or t
  misc_feature (1722)..(1722): n is a, c, g, or t
  misc_feature (1725)..(1725): n is a, c, g, or t
  misc_feature (1731)..(1731): n is a, c, g, or t
  misc_feature (1734)..(1734): n is a, c, g, or t
  misc_feature (1737)..(1737): n is a, c, g, or t
  misc_feature (1740)..(1740): n is a, c, g, or t
  misc_feature (1743)..(1743): n is a, c, g, or t
  misc_feature (1746)..(1746): n is a, c, g, or t
  misc_feature (1752)..(1752): n is a, c, g, or t
  misc_feature (1755)..(1755): n is a, c, g, or t
  misc_feature (1761)..(1761): n is a, c, g, or t
  misc_feature (1776)..(1776): n is a, c, g, or t
  misc_feature (1779)..(1779): n is a, c, g, or t
  misc_feature (1782)..(1782): n is a, c, g, or t
  misc_feature (1788)..(1788): n is a, c, g, or t
  misc_feature (1791)..(1791): n is a, c, g, or t
  misc_feature (1797)..(1797): n is a, c, g, or t
  misc_feature (1800)..(1800): n is a, c, g, or t
  misc_feature (1803)..(1803): n is a, c, g, or t
  misc_feature (1809)..(1809): n is a, c, g, or t
  misc_feature (1812)..(1812): n is a, c, g, or t
  misc_feature (1815)..(1815): n is a, c, g, or t
  misc_feature (1818)..(1818): n is a, c, g, or t
  misc_feature (1824)..(1824): n is a, c, g, or t
  misc_feature (1827)..(1827): n is a, c, g, or t
  misc_feature (1833)..(1833): n is a, c, g, or t
  misc_feature (1839)..(1839): n is a, c, g, or t
  misc_feature (1842)..(1842): n is a, c, g, or t
  misc_feature (1845)..(1845): n is a, c, g, or t
  misc_feature (1854)..(1854): n is a, c, g, or t
  misc_feature (1857)..(1857): n is a, c, g, or t
  misc_feature (1866)..(1866): n is a, c, g, or t
  misc_feature (1875)..(1875): n is a, c, g, or t
  misc_feature (1881)..(1881): n is a, c, g, or t
  misc_feature (1884)..(1884): n is a, c, g, or t
  misc_feature (1887)..(1887): n is a, c, g, or t
  misc_feature (1890)..(1890): n is a, c, g, or t
  misc_feature (1905)..(1905): n is a, c, g, or t
  misc_feature (1911)..(1911): n is a, c, g, or t
  misc_feature (1914)..(1914): n is a, c, g, or t
  misc_feature (1917)..(1917): n is a, c, g, or t
  misc_feature (1920)..(1920): n is a, c, g, or t
  misc_feature (1923)..(1923): n is a, c, g, or t
  misc_feature (1926)..(1926): n is a, c, g, or t
  misc_feature (1932)..(1932): n is a, c, g, or t
  misc_feature (1941)..(1941): n is a, c, g, or t
  misc_feature (1947)..(1947): n is a, c, g, or t
  misc_feature (1953)..(1953): n is a, c, g, or t
  misc_feature (1956)..(1956): n is a, c, g, or t
  misc_feature (1959)..(1959): n is a, c, g, or t
  misc_feature (1965)..(1965): n is a, c, g, or t
  misc_feature (1968)..(1968): n is a, c, g, or t
  misc_feature (1977)..(1977): n is a, c, g, or t
  misc_feature (1980)..(1980): n is a, c, g, or t
  misc_feature (1983)..(1983): n is a, c, g, or t
  misc_feature (1989)..(1989): n is a, c, g, or t
  misc_feature (1992)..(1992): n is a, c, g, or t
  misc_feature (2004)..(2004): n is a, c, g, or t
  misc_feature (2007)..(2007): n is a, c, g, or t
  misc_feature (2010)..(2010): n is a, c, g, or t
  misc_feature (2013)..(2013): n is a, c, g, or t
  misc_feature (2016)..(2016): n is a, c, g, or t
  misc_feature (2019)..(2019): n is a, c, g, or t
  misc_feature (2022)..(2022): n is a, c, g, or t
  misc_feature (2025)..(2025): n is a, c, g, or t
  misc_feature (2028)..(2028): n is a, c, g, or t
  misc_feature (2031)..(2031): n is a, c, g, or t
  misc_feature (2037)..(2037): n is a, c, g, or t
  misc_feature (2046)..(2046): n is a, c, g, or t
  misc_feature (2052)..(2052): n is a, c, g, or t
  misc_feature (2064)..(2064): n is a, c, g, or t
  misc_feature (2070)..(2070): n is a, c, g, or t
  misc_feature (2073)..(2073): n is a, c, g, or t
  misc_feature (2076)..(2076): n is a, c, g, or t
  misc_feature (2079)..(2079): n is a, c, g, or t
  misc_feature (2082)..(2082): n is a, c, g, or t
  misc_feature (2085)..(2085): n is a, c, g, or t
  misc_feature (2088)..(2088): n is a, c, g, or t
  misc_feature (2091)..(2091): n is a, c, g, or t
  misc_feature (2094)..(2094): n is a, c, g, or t
  misc_feature (2097)..(2097): n is a, c, g, or t
  misc_feature (2100)..(2100): n is a, c, g, or t
  misc_feature (2103)..(2103): n is a, c, g, or t
  misc_feature (2106)..(2106): n is a, c, g, or t
  misc_feature (2109)..(2109): n is a, c, g, or t
  misc_feature (2115)..(2115): n is a, c, g, or t
  misc_feature (2118)..(2118): n is a, c, g, or t
  misc_feature (2133)..(2133): n is a, c, g, or t
  misc_feature (2142)..(2142): n is a, c, g, or t
  misc_feature (2148)..(2148): n is a, c, g, or t
  misc_feature (2157)..(2157): n is a, c, g, or t
  misc_feature (2169)..(2169): n is a, c, g, or t
  misc_feature (2172)..(2172): n is a, c, g, or t
  misc_feature (2178)..(2178): n is a, c, g, or t
  misc_feature (2181)..(2181): n is a, c, g, or t
  misc_feature (2184)..(2184): n is a, c, g, or t
  misc_feature (2187)..(2187): n is a, c, g, or t
  misc_feature (2190)..(2190): n is a, c, g, or t
  misc_feature (2193)..(2193): n is a, c, g, or t
  misc_feature (2196)..(2196): n is a, c, g, or t
  misc_feature (2199)..(2199): n is a, c, g, or t
  misc_feature (2205)..(2205): n is a, c, g, or t
  misc_feature (2208)..(2208): n is a, c, g, or t
  misc_feature (2211)..(2211): n is a, c, g, or t
  misc_feature (2214)..(2214): n is a, c, g, or t
  misc_feature (2226)..(2226): n is a, c, g, or t
  misc_feature (2232)..(2232): n is a, c, g, or t
  misc_feature (2235)..(2235): n is a, c, g, or t
  misc_feature (2238)..(2238): n is a, c, g, or t
  misc_feature (2244)..(2244): n is a, c, g, or t
  misc_feature (2250)..(2250): n is a, c, g, or t
atgccnwsntgggcnytnttyatggtnacnwsntgyytnytnytngcnccncaraayytngcncargtnwsnwsncargaygtnwsnytnytngcnwsngaywsngarccnytnaartgyttywsnmgnacnttygargayytnacntgyttytgggaygargargargcngcnccnwsnggnacntaycarytnytntaygcntayccnmgngaraarccnmgngcntgyccnytnwsnwsncarwsnatgccncayttyggnacnmgntaygtntgycarttyccngaycargargargtnmgnytnttyttyccnytncayytntgggtnaaraaygtnttyytnaaycaracnmgnacncarmgngtnytnttygtngaywsngtnggnytnccngcnccnccnwsnathathaargcnatgggnggnwsncarccnggngarytncarathwsntgggargarccngcnccngarathwsngayttyytnmgntaygarytnmgntayggnccnmgngayccnaaraaywsnacnggnccnacngtnathcarytnathgcnacngaracntgytgyccngcnytncarmgnccncaywsngcnwsngcnytngaycarwsnccntgygcncarccnacnatgccntggcargayggnccnaarcaracnwsnccnwsnmgngargcnwsngcnytnacngcngarggnggnwsntgyytnathwsnggnytncarccnggnaaywsntaytggytncarytnmgnwsngarccngayggnathwsnytnggnggnwsntggggnwsntggwsnytnccngtnacngtngayytnccnggngaygcngtngcnytnggnytncartgyttyacnytngayytnaaraaygtnacntgycartggcarcarcargaycaygcnwsnwsncarggnttyttytaycaywsnmgngcnmgntgytgyccnmgngaymgntayccnathtgggaraaytgygargargargaraaracnaayccnggnytncaracnccncarttywsnmgntgycayttyaarwsnmgnaaygaywsnathathcayathytngtngargtnacnacngcnccnggnacngtncaywsntayytnggnwsnccnttytggathcaycargcngtnmgnytnccnacnccnaayytncaytggmgngarathwsnwsnggncayytngarytngartggcarcayccnwsnwsntgggcngcncargaracntgytaycarytnmgntayacnggngarggncaycargaytggaargtnytngarccnccnytnggngcnmgnggnggnacnytngarytnmgnccnmgnwsnmgntaymgnytncarytnmgngcnmgnytnaayggnccnacntaycarggnccntggwsnwsntggwsngayccnacnmgngtngaracngcnacngaracngcntggathwsnytngtnacngcnytncayytngtnytnggnytnwsngcngtnytnggnytnytnytnytnmgntggcarttyccngcncaytaymgnmgnytnmgncaygcnytntggccnwsnytnccngayytncaymgngtnytnggncartayytnmgngayacngcngcnytnwsnccnccnaargcnacngtnwsngayacntgygargargtngarccnwsnytnytngarathytnccnaarwsnwsngarmgnacnccnytnccnytntgywsnwsncargcncaratggaytaymgnmgnytncarccnwsntgyytnggnacnatgccnytnwsngtntgyccnccnatggcngarwsnggnwsntgytgyacnacncayathgcnaaycaywsntayytnccnytnwsntaytggcarcarccnatgwsnwsnccnwsnwsnccnttymgngarcarwsnttyytntgygcngcnggngaygcnggngargarwsnmgngtncargtnytnaaraaygargtnmgnmgnggnwsnccngtnytnytnggntgggtngarcargcntaygcngayaartgygtntgyggnccnwsngcnccnccngcnccnacnccnccnwsnytnwsncarmgngtnatgtgyaaygayytnttyaargtnaayccnttycarytncarcarttymgngcngayccnwsnacngcnwsnytnytnytntgyccnggnggnytngaycayaarytnaayytnmgnggnaargcntggggntrrtrr

SEQ ID NO: 23 - DNA, 2097 bp, Artificial Sequence
  TpoR-CD40
  misc_feature (6)..(6): n is a, c, g, or t
  misc_feature (9)..(9): n is a, c, g, or t
  misc_feature (15)..(15): n is a, c, g, or t
  misc_feature (18)..(18): n is a, c, g, or t
  misc_feature (27)..(27): n is a, c, g, or t
  misc_feature (30)..(30): n is a, c, g, or t
  misc_feature (33)..(33): n is a, c, g, or t
  misc_feature (39)..(39): n is a, c, g, or t
  misc_feature (42)..(42): n is a, c, g, or t
  misc_feature (45)..(45): n is a, c, g, or t
  misc_feature (48)..(48): n is a, c, g, or t
  misc_feature (51)..(51): n is a, c, g, or t
  misc_feature (60)..(60): n is a, c, g, or t
  misc_feature (63)..(63): n is a, c, g, or t
  misc_feature (69)..(69): n is a, c, g, or t
  misc_feature (72)..(72): n is a, c, g, or t
  misc_feature (75)..(75): n is a, c, g, or t
  misc_feature (84)..(84): n is a, c, g, or t
  misc_feature (87)..(87): n is a, c, g, or t
  misc_feature (90)..(90): n is a, c, g, or t
  misc_feature (93)..(93): n is a, c, g, or t
  misc_feature (96)..(96): n is a, c, g, or t
  misc_feature (99)..(99): n is a, c, g, or t
  misc_feature (105)..(105): n is a, c, g, or t
  misc_feature (111)..(111): n is a, c, g, or t
  misc_feature (114)..(114): n is a, c, g, or t
  misc_feature (126)..(126): n is a, c, g, or t
  misc_feature (129)..(129): n is a, c, g, or t
  misc_feature (132)..(132): n is a, c, g, or t
  misc_feature (144)..(144): n is a, c, g, or t
  misc_feature (147)..(147): n is a, c, g, or t
  misc_feature (171)..(171): n is a, c, g, or t
  misc_feature (174)..(174): n is a, c, g, or t
  misc_feature (177)..(177): n is a, c, g, or t
  misc_feature (180)..(180): n is a, c, g, or t
  misc_feature (183)..(183): n is a, c, g, or t
  misc_feature (186)..(186): n is a, c, g, or t
  misc_feature (195)..(195): n is a, c, g, or t
  misc_feature (198)..(198): n is a, c, g, or t
  misc_feature (204)..(204): n is a, c, g, or t
  misc_feature (210)..(210): n is a, c, g, or t
  misc_feature (213)..(213): n is a, c, g, or t
  misc_feature (222)..(222): n is a, c, g, or t
  misc_feature (225)..(225): n is a, c, g, or t
  misc_feature (228)..(228): n is a, c, g, or t
  misc_feature (234)..(234): n is a, c, g, or t
  misc_feature (237)..(237): n is a, c, g, or t
  misc_feature (240)..(240): n is a, c, g, or t
  misc_feature (243)..(243): n is a, c, g, or t
  misc_feature (249)..(249): n is a, c, g, or t
  misc_feature (255)..(255): n is a, c, g, or t
  misc_feature (264)..(264): n is a, c, g, or t
  misc_feature (267)..(267): n is a, c, g, or t
  misc_feature (270)..(270): n is a, c, g, or t
  misc_feature (276)..(276): n is a, c, g, or t
  misc_feature (288)..(288): n is a, c, g, or t
  misc_feature (303)..(303): n is a, c, g, or t
  misc_feature (306)..(306): n is a, c, g, or t
  misc_feature (309)..(309): n is a, c, g, or t
  misc_feature (318)..(318): n is a, c, g, or t
  misc_feature (321)..(321): n is a, c, g, or t
  misc_feature (327)..(327): n is a, c, g, or t
  misc_feature (333)..(333): n is a, c, g, or t
  misc_feature (342)..(342): n is a, c, g, or t
  misc_feature (348)..(348): n is a, c, g, or t
  misc_feature (357)..(357): n is a, c, g, or t
  misc_feature (360)..(360): n is a, c, g, or t
  misc_feature (363)..(363): n is a, c, g, or t
  misc_feature (369)..(369): n is a, c, g, or t
  misc_feature (372)..(372): n is a, c, g, or t
  misc_feature (375)..(375): n is a, c, g, or t
  misc_feature (381)..(381): n is a, c, g, or t
  misc_feature (387)..(387): n is a, c, g, or t
  misc_feature (390)..(390): n is a, c, g, or t
  misc_feature (393)..(393): n is a, c, g, or t
  misc_feature (396)..(396): n is a, c, g, or t
  misc_feature (399)..(399): n is a, c, g, or t
  misc_feature (402)..(402): n is a, c, g, or t
  misc_feature (405)..(405): n is a, c, g, or t
  misc_feature (408)..(408): n is a, c, g, or t
  misc_feature (411)..(411): n is a, c, g, or t
  misc_feature (423)..(423): n is a, c, g, or t
  misc_feature (429)..(429): n is a, c, g, or t
  misc_feature (432)..(432): n is a, c, g, or t
  misc_feature (435)..(435): n is a, c, g, or t
  misc_feature (441)..(441): n is a, c, g, or t
  misc_feature (444)..(444): n is a, c, g, or t
  misc_feature (450)..(450): n is a, c, g, or t
  misc_feature (459)..(459): n is a, c, g, or t
  misc_feature (471)..(471): n is a, c, g, or t
  misc_feature (474)..(474): n is a, c, g, or t
  misc_feature (477)..(477): n is a, c, g, or t
  misc_feature (486)..(486): n is a, c, g, or t
  misc_feature (495)..(495): n is a, c, g, or t
  misc_feature (498)..(498): n is a, c, g, or t
  misc_feature (507)..(507): n is a, c, g, or t
  misc_feature (510)..(510): n is a, c, g, or t
  misc_feature (516)..(516): n is a, c, g, or t
  misc_feature (519)..(519): n is a, c, g, or t
  misc_feature (522)..(522): n is a, c, g, or t
  misc_feature (528)..(528): n is a, c, g, or t
  misc_feature (537)..(537): n is a, c, g, or t
  misc_feature (540)..(540): n is a, c, g, or t
  misc_feature (543)..(543): n is a, c, g, or t
  misc_feature (546)..(546): n is a, c, g, or t
  misc_feature (549)..(549): n is a, c, g, or t
  misc_feature (552)..(552): n is a, c, g, or t
  misc_feature (561)..(561): n is a, c, g, or t
  misc_feature (567)..(567): n is a, c, g, or t
  misc_feature (570)..(570): n is a, c, g, or t
  misc_feature (576)..(576): n is a, c, g, or t
  misc_feature (585)..(585): n is a, c, g, or t
  misc_feature (588)..(588): n is a, c, g, or t
  misc_feature (591)..(591): n is a, c, g, or t
  misc_feature (597)..(597): n is a, c, g, or t
  misc_feature (600)..(600): n is a, c, g, or t
  misc_feature (606)..(606): n is a, c, g, or t
  misc_feature (609)..(609): n is a, c, g, or t
  misc_feature (612)..(612): n is a, c, g, or t
  misc_feature (615)..(615): n is a, c, g, or t
  misc_feature (618)..(618): n is a, c, g, or t
  misc_feature (627)..(627): n is a, c, g, or t
  misc_feature (630)..(630): n is a, c, g, or t
  misc_feature (636)..(636): n is a, c, g, or t
  misc_feature (642)..(642): n is a, c, g, or t
  misc_feature (645)..(645): n is a, c, g, or t
  misc_feature (651)..(651): n is a, c, g, or t
  misc_feature (663)..(663): n is a, c, g, or t
  misc_feature (666)..(666): n is a, c, g, or t
  misc_feature (675)..(675): n is a, c, g, or t
  misc_feature (678)..(678): n is a, c, g, or t
  misc_feature (681)..(681): n is a, c, g, or t
  misc_feature (684)..(684): n is a, c, g, or t
  misc_feature (687)..(687): n is a, c, g, or t
  misc_feature (693)..(693): n is a, c, g, or t
  misc_feature (696)..(696): n is a, c, g, or t
  misc_feature (699)..(699): n is a, c, g, or t
  misc_feature (702)..(702): n is a, c, g, or t
  misc_feature (705)..(705): n is a, c, g, or t
  misc_feature (708)..(708): n is a, c, g, or t
  misc_feature (714)..(714): n is a, c, g, or t
  misc_feature (717)..(717): n is a, c, g, or t
  misc_feature (720)..(720): n is a, c, g, or t
  misc_feature (726)..(726): n is a, c, g, or t
  misc_feature (732)..(732): n is a, c, g, or t
  misc_feature (735)..(735): n is a, c, g, or t
  misc_feature (738)..(738): n is a, c, g, or t
  misc_feature (744)..(744): n is a, c, g, or t
  misc_feature (747)..(747): n is a, c, g, or t
  misc_feature (753)..(753): n is a, c, g, or t
  misc_feature (762)..(762): n is a, c, g, or t
  misc_feature (768)..(768): n is a, c, g, or t
  misc_feature (771)..(771): n is a, c, g, or t
  misc_feature (774)..(774): n is a, c, g, or t
  misc_feature (780)..(780): n is a, c, g, or t
  misc_feature (786)..(786): n is a, c, g, or t
  misc_feature (792)..(792): n is a, c, g, or t
  misc_feature (795)..(795): n is a, c, g, or t
  misc_feature (798)..(798): n is a, c, g, or t
  misc_feature (801)..(801): n is a, c, g, or t
  misc_feature (804)..(804): n is a, c, g, or t
  misc_feature (810)..(810): n is a, c, g, or t
  misc_feature (813)..(813): n is a, c, g, or t
  misc_feature (819)..(819): n is a, c, g, or t
  misc_feature (822)..(822): n is a, c, g, or t
  misc_feature (825)..(825): n is a, c, g, or t
  misc_feature (828)..(828): n is a, c, g, or t
  misc_feature (831)..(831): n is a, c, g, or t
  misc_feature (834)..(834): n is a, c, g, or t
  misc_feature (840)..(840): n is a, c, g, or t
  misc_feature (843)..(843): n is a, c, g, or t
  misc_feature (846)..(846): n is a, c, g, or t
  misc_feature (852)..(852): n is a, c, g, or t
  misc_feature (855)..(855): n is a, c, g, or t
  misc_feature (858)..(858): n is a, c, g, or t
  misc_feature (861)..(861): n is a, c, g, or t
  misc_feature (864)..(864): n is a, c, g, or t
  misc_feature (867)..(867): n is a, c, g, or t
  misc_feature (879)..(879): n is a, c, g, or t
  misc_feature (882)..(882): n is a, c, g, or t
  misc_feature (888)..(888): n is a, c, g, or t
  misc_feature (897)..(897): n is a, c, g, or t
  misc_feature (900)..(900): n is a, c, g, or t
  misc_feature (927)..(927): n is a, c, g, or t
  misc_feature (930)..(930): n is a, c, g, or t
  misc_feature (933)..(933): n is a, c, g, or t
  misc_feature (939)..(939): n is a, c, g, or t
  misc_feature (954)..(954): n is a, c, g, or t
  misc_feature (957)..(957): n is a, c, g, or t
  misc_feature (960)..(960): n is a, c, g, or t
  misc_feature (963)..(963): n is a, c, g, or t
  misc_feature (972)..(972): n is a, c, g, or t
  misc_feature (975)..(975): n is a, c, g, or t
  misc_feature (981)..(981): n is a, c, g, or t
  misc_feature (987)..(987): n is a, c, g, or t
  misc_feature (1020)..(1020): n is a, c, g, or t
  misc_feature (1026)..(1026): n is a, c, g, or t
  misc_feature (1029)..(1029): n is a, c, g, or t
  misc_feature (1032)..(1032): n is a, c, g, or t
  misc_feature (1038)..(1038): n is a, c, g, or t
  misc_feature (1041)..(1041): n is a, c, g, or t
  misc_feature (1050)..(1050): n is a, c, g, or t
  misc_feature (1053)..(1053): n is a, c, g, or t
  misc_feature (1068)..(1068): n is a, c, g, or t
  misc_feature (1071)..(1071): n is a, c, g, or t
  misc_feature (1080)..(1080): n is a, c, g, or t
  misc_feature (1095)..(1095): n is a, c, g, or t
  misc_feature (1098)..(1098): n is a, c, g, or t
  misc_feature (1104)..(1104): n is a, c, g, or t
  misc_feature (1107)..(1107): n is a, c, g, or t
  misc_feature (1110)..(1110): n is a, c, g, or t
  misc_feature (1113)..(1113): n is a, c, g, or t
  misc_feature (1116)..(1116): n is a, c, g, or t
  misc_feature (1119)..(1119): n is a, c, g, or t
  misc_feature (1122)..(1122): n is a, c, g, or t
  misc_feature (1125)..(1125): n is a, c, g, or t
  misc_feature (1131)..(1131): n is a, c, g, or t
  misc_feature (1137)..(1137): n is a, c, g, or t
  misc_feature (1140)..(1140): n is a, c, g, or t
  misc_feature (1143)..(1143): n is a, c, g, or t
  misc_feature (1146)..(1146): n is a, c, g, or t
  misc_feature (1164)..(1164): n is a, c, g, or t
  misc_feature (1167)..(1167): n is a, c, g, or t
  misc_feature (1170)..(1170): n is a, c, g, or t
  misc_feature (1173)..(1173): n is a, c, g, or t
  misc_feature (1176)..(1176): n is a, c, g, or t
  misc_feature (1179)..(1179): n is a, c, g, or t
  misc_feature (1182)..(1182): n is a, c, g, or t
  misc_feature (1188)..(1188): n is a, c, g, or t
  misc_feature (1197)..(1197): n is a, c, g, or t
  misc_feature (1206)..(1206): n is a, c, g, or t
  misc_feature (1209)..(1209): n is a, c, g, or t
  misc_feature (1212)..(1212): n is a, c, g, or t
  misc_feature (1218)..(1218): n is a, c, g, or t
  misc_feature (1224)..(1224): n is a, c, g, or t
  misc_feature (1239)..(1239): n is a, c, g, or t
  misc_feature (1242)..(1242): n is a, c, g, or t
  misc_feature (1245)..(1245): n is a, c, g, or t
  misc_feature (1251)..(1251): n is a, c, g, or t
  misc_feature (1254)..(1254): n is a, c, g, or t
  misc_feature (1263)..(1263): n is a, c, g, or t
  misc_feature (1275)..(1275): n is a, c, g, or t
  misc_feature (1278)..(1278): n is a, c, g, or t
  misc_feature (1284)..(1284): n is a, c, g, or t
  misc_feature (1287)..(1287): n is a, c, g, or t
  misc_feature (1293)..(1293): n is a, c, g, or t
  misc_feature (1311)..(1311): n is a, c, g, or t
  misc_feature (1314)..(1314): n is a, c, g, or t
  misc_feature (1320)..(1320): n is a, c, g, or t
  misc_feature (1323)..(1323): n is a, c, g, or t
  misc_feature (1326)..(1326): n is a, c, g, or t
  misc_feature (1329)..(1329): n is a, c, g, or t
  misc_feature (1332)..(1332): n is a, c, g, or t
  misc_feature (1335)..(1335): n is a, c, g, or t
  misc_feature (1338)..(1338): n is a, c, g, or t
  misc_feature (1341)..(1341): n is a, c, g, or t
  misc_feature (1344)..(1344): n is a, c, g, or t
  misc_feature (1347)..(1347): n is a, c, g, or t
  misc_feature (1353)..(1353): n is a, c, g, or t
  misc_feature (1356)..(1356): n is a, c, g, or t
  misc_feature (1359)..(1359): n is a, c, g, or t
  misc_feature (1362)..(1362): n is a, c, g, or t
  misc_feature (1365)..(1365): n is a, c, g, or t
  misc_feature (1368)..(1368): n is a, c, g, or t
  misc_feature (1374)..(1374): n is a, c, g, or t
  misc_feature (1377)..(1377): n is a, c, g, or t
  misc_feature (1383)..(1383): n is a, c, g, or t
  misc_feature (1386)..(1386): n is a, c, g, or t
  misc_feature (1389)..(1389): n is a, c, g, or t
  misc_feature (1392)..(1392): n is a, c, g, or t
  misc_feature (1395)..(1395): n is a, c, g, or t
  misc_feature (1401)..(1401): n is a, c, g, or t
  misc_feature (1404)..(1404): n is a, c, g, or t
  misc_feature (1407)..(1407): n is a, c, g, or t
  misc_feature (1416)..(1416): n is a, c, g, or t
  misc_feature (1419)..(1419): n is a, c, g, or t
  misc_feature (1425)..(1425): n is a, c, g, or t
  misc_feature (1428)..(1428): n is a, c, g, or t
  misc_feature (1434)..(1434): n is a, c, g, or t
  misc_feature (1440)..(1440): n is a, c, g, or t
  misc_feature (1443)..(1443): n is a, c, g, or t
  misc_feature (1446)..(1446): n is a, c, g, or t
  misc_feature (1449)..(1449): n is a, c, g, or t
  misc_feature (1455)..(1455): n is a, c, g, or t
  misc_feature (1458)..(1458): n is a, c, g, or t
  misc_feature (1461)..(1461): n is a, c, g, or t
  misc_feature (1467)..(1467): n is a, c, g, or t
  misc_feature (1470)..(1470): n is a, c, g, or t
  misc_feature (1479)..(1479): n is a, c, g, or t
  misc_feature (1482)..(1482): n is a, c, g, or t
  misc_feature (1485)..(1485): n is a, c, g, or t
  misc_feature (1488)..(1488): n is a, c, g, or t
  misc_feature (1491)..(1491): n is a, c, g, or t
  misc_feature (1494)..(1494): n is a, c, g, or t
  misc_feature (1500)..(1500): n is a, c, g, or t
  misc_feature (1503)..(1503): n is a, c, g, or t
  misc_feature (1506)..(1506): n is a, c, g, or t
  misc_feature (1509)..(1509): n is a, c, g, or t
  misc_feature (1512)..(1512): n is a, c, g, or t
  misc_feature (1515)..(1515): n is a, c, g, or t
  misc_feature (1518)..(1518): n is a, c, g, or t
  misc_feature (1521)..(1521): n is a, c, g, or t
  misc_feature (1524)..(1524): n is a, c, g, or t
  misc_feature (1527)..(1527): n is a, c, g, or t
  misc_feature (1530)..(1530): n is a, c, g, or t
  misc_feature (1533)..(1533): n is a, c, g, or t
  misc_feature (1536)..(1536): n is a, c, g, or t
  misc_feature (1539)..(1539): n is a, c, g, or t
  misc_feature (1542)..(1542): n is a, c, g, or t
  misc_feature (1554)..(1554): n is a, c, g, or t
  misc_feature (1557)..(1557): n is a, c, g, or t
  misc_feature (1566)..(1566): n is a, c, g, or t
  misc_feature (1569)..(1569): n is a, c, g, or t
  misc_feature (1572)..(1572): n is a, c, g, or t
  misc_feature (1575)..(1575): n is a, c, g, or t
  misc_feature (1581)..(1581): n is a, c, g, or t
  misc_feature (1584)..(1584): n is a, c, g, or t
  misc_feature (1590)..(1590): n is a, c, g, or t
  misc_feature (1593)..(1593): n is a, c, g, or t
  misc_feature (1596)..(1596): n is a, c, g, or t
  misc_feature (1599)..(1599): n is a, c, g, or t
  misc_feature (1605)..(1605): n is a, c, g, or t
  misc_feature (1611)..(1611): n is a, c, g, or t
  misc_feature (1614)..(1614): n is a, c, g, or t
  misc_feature (1617)..(1617): n is a, c, g, or t
  misc_feature (1620)..(1620): n is a, c, g, or t
  misc_feature (1629)..(1629): n is a, c, g, or t
  misc_feature (1632)..(1632): n is a, c, g, or t
  misc_feature (1638)..(1638): n is a, c, g, or t
  misc_feature (1641)..(1641): n is a, c, g, or t
  misc_feature (1644)..(1644): n is a, c, g, or t
  misc_feature (1647)..(1647): n is a, c, g, or t
  misc_feature (1650)..(1650): n is a, c, g, or t
  misc_feature (1653)..(1653): n is a, c, g, or t
  misc_feature (1656)..(1656): n is a, c, g, or t
  misc_feature (1662)..(1662): n is a, c, g, or t
  misc_feature (1665)..(1665): n is a, c, g, or t
  misc_feature (1668)..(1668): n is a, c, g, or t
  misc_feature (1671)..(1671): n is a, c, g, or t
  misc_feature (1677)..(1677): n is a, c, g, or t
  misc_feature (1689)..(1689): n is a, c, g, or t
  misc_feature (1695)..(1695): n is a, c, g, or t
  misc_feature (1698)..(1698): n is a, c, g, or t
  misc_feature (1701)..(1701): n is a, c, g, or t
  misc_feature (1704)..(1704): n is a, c, g, or t
  misc_feature (1713)..(1713): n is a, c, g, or t
  misc_feature (1716)..(1716): n is a, c, g, or t
  misc_feature (1722)..(1722): n is a, c, g, or t
  misc_feature (1725)..(1725): n is a, c, g, or t
  misc_feature (1731)..(1731): n is a, c, g, or t
  misc_feature (1734)..(1734): n is a, c, g, or t
  misc_feature (1737)..(1737): n is a, c, g, or t
  misc_feature (1740)..(1740): n is a, c, g, or t
  misc_feature (1743)..(1743): n is a, c, g, or t
  misc_feature (1746)..(1746): n is a, c, g, or t
  misc_feature (1752)..(1752): n is a, c, g, or t
  misc_feature (1755)..(1755): n is a, c, g, or t
  misc_feature (1761)..(1761): n is a, c, g, or t
  misc_feature (1776)..(1776): n is a, c, g, or t
  misc_feature (1779)..(1779): n is a, c, g, or t
  misc_feature (1782)..(1782): n is a, c, g, or t
  misc_feature (1788)..(1788): n is a, c, g, or t
  misc_feature (1791)..(1791): n is a, c, g, or t
  misc_feature (1797)..(1797): n is a, c, g, or t
  misc_feature (1800)..(1800): n is a, c, g, or t
  misc_feature (1803)..(1803): n is a, c, g, or t
  misc_feature (1809)..(1809): n is a, c, g, or t
  misc_feature (1812)..(1812): n is a, c, g, or t
  misc_feature (1815)..(1815): n is a, c, g, or t
  misc_feature (1818)..(1818): n is a, c, g, or t
  misc_feature (1824)..(1824): n is a, c, g, or t
  misc_feature (1827)..(1827): n is a, c, g, or t
  misc_feature (1833)..(1833): n is a, c, g, or t
  misc_feature (1839)..(1839): n is a, c, g, or t
  misc_feature (1842)..(1842): n is a, c, g, or t
  misc_feature (1845)..(1845): n is a, c, g, or t
  misc_feature (1854)..(1854): n is a, c, g, or t
  misc_feature (1857)..(1857): n is a, c, g, or t
  misc_feature (1866)..(1866): n is a, c, g, or t
  misc_feature (1875)..(1875): n is a, c, g, or t
  misc_feature (1881)..(1881): n is a, c, g, or t
  misc_feature (1884)..(1884): n is a, c, g, or t
  misc_feature (1887)..(1887): n is a, c, g, or t
  misc_feature (1890)..(1890): n is a, c, g, or t
  misc_feature (1905)..(1905): n is a, c, g, or t
  misc_feature (1914)..(1914): n is a, c, g, or t
  misc_feature (1917)..(1917): n is a, c, g, or t
  misc_feature (1926)..(1926): n is a, c, g, or t
  misc_feature (1929)..(1929): n is a, c, g, or t
  misc_feature (1938)..(1938): n is a, c, g, or t
  misc_feature (1941)..(1941): n is a, c, g, or t
  misc_feature (1947)..(1947): n is a, c, g, or t
  misc_feature (1959)..(1959): n is a, c, g, or t
  misc_feature (1977)..(1977): n is a, c, g, or t
  misc_feature (1986)..(1986): n is a, c, g, or t
  misc_feature (1989)..(1989): n is a, c, g, or t
  misc_feature (1992)..(1992): n is a, c, g, or t
  misc_feature (1995)..(1995): n is a, c, g, or t
  misc_feature (2001)..(2001): n is a, c, g, or t
  misc_feature (2004)..(2004): n is a, c, g, or t
  misc_feature (2007)..(2007): n is a, c, g, or t
  misc_feature (2010)..(2010): n is a, c, g, or t
  misc_feature (2013)..(2013): n is a, c, g, or t
  misc_feature (2022)..(2022): n is a, c, g, or t
  misc_feature (2025)..(2025): n is a, c, g, or t
  misc_feature (2031)..(2031): n is a, c, g, or t
  misc_feature (2040)..(2040): n is a, c, g, or t
  misc_feature (2043)..(2043): n is a, c, g, or t
  misc_feature (2046)..(2046): n is a, c, g, or t
  misc_feature (2058)..(2058): n is a, c, g, or t
  misc_feature (2067)..(2067): n is a, c, g, or t
  misc_feature (2070)..(2070): n is a, c, g, or t
  misc_feature (2076)..(2076): n is a, c, g, or t
  misc_feature (2079)..(2079): n is a, c, g, or t
  misc_feature (2088)..(2088): n is a, c, g, or t
atgccnwsntgggcnytnttyatggtnacnwsntgyytnytnytngcnccncaraayytngcncargtnwsnwsncargaygtnwsnytnytngcnwsngaywsngarccnytnaartgyttywsnmgnacnttygargayytnacntgyttytgggaygargargargcngcnccnwsnggnacntaycarytnytntaygcntayccnmgngaraarccnmgngcntgyccnytnwsnwsncarwsnatgccncayttyggnacnmgntaygtntgycarttyccngaycargargargtnmgnytnttyttyccnytncayytntgggtnaaraaygtnttyytnaaycaracnmgnacncarmgngtnytnttygtngaywsngtnggnytnccngcnccnccnwsnathathaargcnatgggnggnwsncarccnggngarytncarathwsntgggargarccngcnccngarathwsngayttyytnmgntaygarytnmgntayggnccnmgngayccnaaraaywsnacnggnccnacngtnathcarytnathgcnacngaracntgytgyccngcnytncarmgnccncaywsngcnwsngcnytngaycarwsnccntgygcncarccnacnatgccntggcargayggnccnaarcaracnwsnccnwsnmgngargcnwsngcnytnacngcngarggnggnwsntgyytnathwsnggnytncarccnggnaaywsntaytggytncarytnmgnwsngarccngayggnathwsnytnggnggnwsntggggnwsntggwsnytnccngtnacngtngayytnccnggngaygcngtngcnytnggnytncartgyttyacnytngayytnaaraaygtnacntgycartggcarcarcargaycaygcnwsnwsncarggnttyttytaycaywsnmgngcnmgntgytgyccnmgngaymgntayccnathtgggaraaytgygargargargaraaracnaayccnggnytncaracnccncarttywsnmgntgycayttyaarwsnmgnaaygaywsnathathcayathytngtngargtnacnacngcnccnggnacngtncaywsntayytnggnwsnccnttytggathcaycargcngtnmgnytnccnacnccnaayytncaytggmgngarathwsnwsnggncayytngarytngartggcarcayccnwsnwsntgggcngcncargaracntgytaycarytnmgntayacnggngarggncaycargaytggaargtnytngarccnccnytnggngcnmgnggnggnacnytngarytnmgnccnmgnwsnmgntaymgnytncarytnmgngcnmgnytnaayggnccnacntaycarggnccntggwsnwsntggwsngayccnacnmgngtngaracngcnacngaracngcntggathwsnytngtnacngcnytncayytngtnytnggnytnwsngcngtnytnggnytnytnytnytnmgntggcarttyccngcncaytaymgnmgnytnmgncaygcnytntggccnwsnytnccngayytncaymgngtnytnggncartayytnmgngayacngcngcnytnwsnccnccnaargcnacngtnwsngayacntgygargargtngarccnwsnytnytngarathytnccnaarwsnwsngarmgnacnccnytnccnytntgywsnwsncargcncaratggaytaymgnmgnytncarccnwsntgyytnggnacnatgccnytnwsngtntgyccnccnatggcngarwsnggnwsntgytgyacnacncayathgcnaaycaywsntayytnccnytnwsntaytggcarcarccnaaraargtngcnaaraarccnacnaayaargcnccncayccnaarcargarccncargarathaayttyccngaygayytnccnggnwsnaayacngcngcnccngtncargaracnytncayggntgycarccngtnacncargargayggnaargarwsnmgnathwsngtncargarmgncartrrtrr

SEQ ID NO: 24 - DNA, 2034 bp, Artificial Sequence
  TpoR-ITAM1
  misc_feature (6)..(6): n is a, c, g, or t
  misc_feature (9)..(9): n is a, c, g, or t
  misc_feature (15)..(15): n is a, c, g, or t
  misc_feature (18)..(18): n is a, c, g, or t
  misc_feature (27)..(27): n is a, c, g, or t
  misc_feature (30)..(30): n is a, c, g, or t
  misc_feature (33)..(33): n is a, c, g, or t
  misc_feature (39)..(39): n is a, c, g, or t
  misc_feature (42)..(42): n is a, c, g, or t
  misc_feature (45)..(45): n is a, c, g, or t
  misc_feature (48)..(48): n is a, c, g, or t
  misc_feature (51)..(51): n is a, c, g, or t
  misc_feature (60)..(60): n is a, c, g, or t
  misc_feature (63)..(63): n is a, c, g, or t
  misc_feature (69)..(69): n is a, c, g, or t
  misc_feature (72)..(72): n is a, c, g, or t
  misc_feature (75)..(75): n is a, c, g, or t
  misc_feature (84)..(84): n is a, c, g, or t
  misc_feature (87)..(87): n is a, c, g, or t
  misc_feature (90)..(90): n is a, c, g, or t
  misc_feature (93)..(93): n is a, c, g, or t
  misc_feature (96)..(96): n is a, c, g, or t
  misc_feature (99)..(99): n is a, c, g, or t
  misc_feature (105)..(105): n is a, c, g, or t
  misc_feature (111)..(111): n is a, c, g, or t
  misc_feature (114)..(114): n is a, c, g, or t
  misc_feature (126)..(126): n is a, c, g, or t
  misc_feature (129)..(129): n is a, c, g, or t
  misc_feature (132)..(132): n is a, c, g, or t
  misc_feature (144)..(144): n is a, c, g, or t
  misc_feature (147)..(147): n is a, c, g, or t
  misc_feature (171)..(171): n is a, c, g, or t
  misc_feature (174)..(174): n is a, c, g, or t
  misc_feature (177)..(177): n is a, c, g, or t
  misc_feature (180)..(180): n is a, c, g, or t
  misc_feature (183)..(183): n is a, c, g, or t
  misc_feature (186)..(186): n is a, c, g, or t
  misc_feature (195)..(195): n is a, c, g, or t
  misc_feature (198)..(198): n is a, c, g, or t
  misc_feature (204)..(204): n is a, c, g, or t
  misc_feature (210)..(210): n is a, c, g, or t
  misc_feature (213)..(213): n is a, c, g, or t
  misc_feature (222)..(222): n is a, c, g, or t
  misc_feature (225)..(225): n is a, c, g, or t
  misc_feature (228)..(228): n is a, c, g, or t
  misc_feature (234)..(234): n is a, c, g, or t
  misc_feature (237)..(237): n is a, c, g, or t
  misc_feature (240)..(240): n is a, c, g, or t
  misc_feature (243)..(243): n is a, c, g, or t
  misc_feature (249)..(249): n is a, c, g, or t
  misc_feature (255)..(255): n is a, c, g, or t
  misc_feature (264)..(264): n is a, c, g, or t
  misc_feature (267)..(267): n is a, c, g, or t
  misc_feature (270)..(270): n is a, c, g, or t
  misc_feature (276)..(276): n is a, c, g, or t
  misc_feature (288)..(288): n is a, c, g, or t
  misc_feature (303)..(303): n is a, c, g, or t
  misc_feature (306)..(306): n is a, c, g, or t
  misc_feature (309)..(309): n is a, c, g, or t
  misc_feature (318)..(318): n is a, c, g, or t
  misc_feature (321)..(321): n is a, c, g, or t
  misc_feature (327)..(327): n is a, c, g, or t
  misc_feature (333)..(333): n is a, c, g, or t
  misc_feature (342)..(342): n is a, c, g, or t
  misc_feature (348)..(348): n is a, c, g, or t
  misc_feature (357)..(357): n is a, c, g, or t
  misc_feature (360)..(360): n is a, c, g, or t
  misc_feature (363)..(363): n is a, c, g, or t
  misc_feature (369)..(369): n is a, c, g, or t
  misc_feature (372)..(372): n is a, c, g, or t
  misc_feature (375)..(375): n is a, c, g, or t
  misc_feature (381)..(381): n is a, c, g, or t
  misc_feature (387)..(387): n is a, c, g, or t
  misc_feature (390)..(390): n is a, c, g, or t
  misc_feature (393)..(393): n is a, c, g, or t
  misc_feature (396)..(396): n is a, c, g, or t
  misc_feature (399)..(399): n is a, c, g, or t
  misc_feature (402)..(402): n is a, c, g, or t
  misc_feature (405)..(405): n is a, c, g, or t
  misc_feature (408)..(408): n is a, c, g, or t
  misc_feature (411)..(411): n is a, c, g, or t
  misc_feature (423)..(423): n is a, c, g, or t
  misc_feature (429)..(429): n is a, c, g, or t
  misc_feature (432)..(432): n is a, c, g, or t
  misc_feature (435)..(435): n is a, c, g, or t
  misc_feature (441)..(441): n is a, c, g, or t
  misc_feature (444)..(444): n is a, c, g, or t
  misc_feature (450)..(450): n is a, c, g, or t
  misc_feature (459)..(459): n is a, c, g, or t
  misc_feature (471)..(471): n is a, c, g, or t
  misc_feature (474)..(474): n is a, c, g, or t
  misc_feature (477)..(477): n is a, c, g, or t
  misc_feature (486)..(486): n is a, c, g, or t
  misc_feature (495)..(495): n is a, c, g, or t
  misc_feature (498)..(498): n is a, c, g, or t
  misc_feature (507)..(507): n is a, c, g, or t
  misc_feature (510)..(510): n is a, c, g, or t
  misc_feature (516)..(516): n is a, c, g, or t
  misc_feature (519)..(519): n is a, c, g, or t
  misc_feature (522)..(522): n is a, c, g, or t
  misc_feature (528)..(528): n is a, c, g, or t
  misc_feature (537)..(537): n is a, c, g, or t
  misc_feature (540)..(540): n is a, c, g, or t
  misc_feature (543)..(543): n is a, c, g, or t
  misc_feature (546)..(546): n is a, c, g, or t
  misc_feature (549)..(549): n is a, c, g, or t
  misc_feature (552)..(552): n is a, c, g, or t
  misc_feature (561)..(561): n is a, c, g, or t
  misc_feature (567)..(567): n is a, c, g, or t
  misc_feature (570)..(570): n is a, c, g, or t
  misc_feature (576)..(576): n is a, c, g, or t
  misc_feature (585)..(585): n is a, c, g, or t
  misc_feature (588)..(588): n is a, c, g, or t
  misc_feature (591)..(591): n is a, c, g, or t
  misc_feature (597)..(597): n is a, c, g, or t
  misc_feature (600)..(600): n is a, c, g, or t
  misc_feature (606)..(606): n is a, c, g, or t
  misc_feature (609)..(609): n is a, c, g, or t
  misc_feature (612)..(612): n is a, c, g, or t
  misc_feature (615)..(615): n is a, c, g, or t
  misc_feature (618)..(618): n is a, c, g, or t
  misc_feature (627)..(627): n is a, c, g, or t
  misc_feature (630)..(630): n is a, c, g, or t
  misc_feature (636)..(636): n is a, c, g, or t
  misc_feature (642)..(642): n is a, c, g, or t
  misc_feature (645)..(645): n is a, c, g, or t
  misc_feature (651)..(651): n is a, c, g, or t
  misc_feature (663)..(663): n is a, c, g, or t
  misc_feature (666)..(666): n is a, c, g, or t
  misc_feature (675)..(675): n is a, c, g, or t
  misc_feature (678)..(678): n is a, c, g, or t
  misc_feature (681)..(681): n is a, c, g, or t
  misc_feature (684)..(684): n is a, c, g, or t
  misc_feature (687)..(687): n is a, c, g, or t
  misc_feature (693)..(693): n is a, c, g, or t
  misc_feature (696)..(696): n is a, c, g, or t
  misc_feature (699)..(699): n is a, c, g, or t
  misc_feature (702)..(702): n is a, c, g, or t
  misc_feature (705)..(705): n is a, c, g, or t
  misc_feature (708)..(708): n is a, c, g, or t
  misc_feature (714)..(714): n is a, c, g, or t
  misc_feature (717)..(717): n is a, c, g, or t
  misc_feature (720)..(720): n is a, c, g, or t
  misc_feature (726)..(726): n is a, c, g, or t
  misc_feature (732)..(732): n is a, c, g, or t
  misc_feature (735)..(735): n is a, c, g, or t
  misc_feature (738)..(738): n is a, c, g, or t
  misc_feature (744)..(744): n is a, c, g, or t
  misc_feature (747)..(747): n is a, c, g, or t
  misc_feature (753)..(753): n is a, c, g, or t
  misc_feature (762)..(762): n is a, c, g, or t
  misc_feature (768)..(768): n is a, c, g, or t
  misc_feature (771)..(771): n is a, c, g, or t
  misc_feature (774)..(774): n is a, c, g, or t
  misc_feature (780)..(780): n is a, c, g, or t
  misc_feature (786)..(786): n is a, c, g, or t
  misc_feature (792)..(792): n is a, c, g, or t
  misc_feature (795)..(795): n is a, c, g, or t
  misc_feature (798)..(798): n is a, c, g, or t
  misc_feature (801)..(801): n is a, c, g, or t
  misc_feature (804)..(804): n is a, c, g, or t
  misc_feature (810)..(810): n is a, c, g, or t
  misc_feature (813)..(813): n is a, c, g, or t
  misc_feature (819)..(819): n is a, c, g, or t
  misc_feature (822)..(822): n is a, c, g, or t
  misc_feature (825)..(825): n is a, c, g, or t
  misc_feature (828)..(828): n is a, c, g, or t
  misc_feature (831)..(831): n is a, c, g, or t
  misc_feature (834)..(834): n is a, c, g, or t
  misc_feature (840)..(840): n is a, c, g, or t
  misc_feature (843)..(843): n is a, c, g, or t
  misc_feature (846)..(846): n is a, c, g, or t
  misc_feature (852)..(852): n is a, c, g, or t
  misc_feature (855)..(855): n is a, c, g, or t
  misc_feature (858)..(858): n is a, c, g, or t
  misc_feature (861)..(861): n is a, c, g, or t
  misc_feature (864)..(864): n is a, c, g, or t
  misc_feature (867)..(867): n is a, c, g, or t
  misc_feature (879)..(879): n is a, c, g, or t
  misc_feature (882)..(882): n is a, c, g, or t
  misc_feature (888)..(888): n is a, c, g, or t
  misc_feature (897)..(897): n is a, c, g, or t
  misc_feature (900)..(900): n is a, c, g, or t
  misc_feature (927)..(927): n is a, c, g, or t
  misc_feature (930)..(930): n is a, c, g, or t
  misc_feature (933)..(933): n is a, c, g, or t
  misc_feature (939)..(939): n is a, c, g, or t
  misc_feature (954)..(954): n is a, c, g, or t
  misc_feature (957)..(957): n is a, c, g, or t
  misc_feature (960)..(960): n is a, c, g, or t
  misc_feature (963)..(963): n is a, c, g, or t
  misc_feature (972)..(972): n is a, c, g, or t
  misc_feature (975)..(975): n is a, c, g, or t
  misc_feature (981)..(981): n is a, c, g, or t
  misc_feature (987)..(987): n is a, c, g, or t
  misc_feature (1020)..(1020): n is a, c, g, or t
  misc_feature (1026)..(1026): n is a, c, g, or t
  misc_feature (1029)..(1029): n is a, c, g, or t
  misc_feature (1032)..(1032): n is a, c, g, or t
  misc_feature (1038)..(1038): n is a, c, g, or t
  misc_feature (1041)..(1041): n is a, c, g, or t
  misc_feature (1050)..(1050): n is a, c, g, or t
  misc_feature (1053)..(1053): n is a, c, g, or t
  misc_feature (1068)..(1068): n is a, c, g, or t
  misc_feature (1071)..(1071): n is a, c, g, or t
  misc_feature (1080)..(1080): n is a, c, g, or t
  misc_feature (1095)..(1095): n is a, c, g, or t
  misc_feature (1098)..(1098): n is a, c, g, or t
  misc_feature (1104)..(1104): n is a, c, g, or t
  misc_feature (1107)..(1107): n is a, c, g, or t
  misc_feature (1110)..(1110): n is a, c, g, or t
  misc_feature (1113)..(1113): n is a, c, g, or t
  misc_feature (1116)..(1116): n is a, c, g, or t
  misc_feature (1119)..(1119): n is a, c, g, or t
  misc_feature (1122)..(1122): n is a, c, g, or t
  misc_feature (1125)..(1125): n is a, c, g, or t
  misc_feature (1131)..(1131): n is a, c, g, or t
  misc_feature (1137)..(1137): n is a, c, g, or t
  misc_feature (1140)..(1140): n is a, c, g, or t
  misc_feature (1143)..(1143): n is a, c, g, or t
  misc_feature (1146)..(1146): n is a, c, g, or t
  misc_feature (1164)..(1164): n is a, c, g, or t
  misc_feature (1167)..(1167): n is a, c, g, or t
  misc_feature (1170)..(1170): n is a, c, g, or t
  misc_feature (1173)..(1173): n is a, c, g, or t
  misc_feature (1176)..(1176): n is a, c, g, or t
  misc_feature (1179)..(1179): n is a, c, g, or t
  misc_feature (1182)..(1182): n is a, c, g, or t
  misc_feature (1188)..(1188): n is a, c, g, or t
  misc_feature (1197)..(1197): n is a, c, g, or t
  misc_feature (1206)..(1206): n is a, c, g, or t
  misc_feature (1209)..(1209): n is a, c, g, or t
  misc_feature (1212)..(1212): n is a, c, g, or t
  misc_feature (1218)..(1218): n is a, c, g, or t
  misc_feature (1224)..(1224): n is a, c, g, or t
  misc_feature (1239)..(1239): n is a, c, g, or t
  misc_feature (1242)..(1242): n is a, c, g, or t
  misc_feature (1245)..(1245): n is a, c, g, or t
  misc_feature (1251)..(1251): n is a, c, g, or t
  misc_feature (1254)..(1254): n is a, c, g, or t
  misc_feature (1263)..(1263): n is a, c, g, or t
  misc_feature (1275)..(1275): n is a, c, g, or t
  misc_feature (1278)..(1278): n is a, c, g, or t
  misc_feature (1284)..(1284): n is a, c, g, or t
  misc_feature (1287)..(1287): n is a, c, g, or t
  misc_feature (1293)..(1293): n is a, c, g, or t
  misc_feature (1311)..(1311): n is a, c, g, or t
  misc_feature (1314)..(1314): n is a, c, g, or t
  misc_feature (1320)..(1320): n is a, c, g, or t
  misc_feature (1323)..(1323): n is a, c, g, or t
  misc_feature (1326)..(1326): n is a, c, g, or t
  misc_feature (1329)..(1329): n is a, c, g, or t
  misc_feature (1332)..(1332): n is a, c, g, or t
  misc_feature (1335)..(1335): n is a, c, g, or t
  misc_feature (1338)..(1338): n is a, c, g, or t
  misc_feature (1341)..(1341): n is a, c, g, or t
  misc_feature (1344)..(1344): n is a, c, g, or t
  misc_feature (1347)..(1347): n is a, c, g, or t
  misc_feature (1353)..(1353): n is a, c, g, or t
  misc_feature (1356)..(1356): n is a, c, g, or t
  misc_feature (1359)..(1359): n is a, c, g, or t
  misc_feature (1362)..(1362): n is a, c, g, or t
  misc_feature (1365)..(1365): n is a, c, g, or t
  misc_feature (1368)..(1368): n is a, c, g, or t
  misc_feature (1374)..(1374): n is a, c, g, or t
  misc_feature (1377)..(1377): n is a, c, g, or t
  misc_feature (1383)..(1383): n is a, c, g, or t
  misc_feature (1386)..(1386): n is a, c, g, or t
  misc_feature (1389)..(1389): n is a, c, g, or t
  misc_feature (1392)..(1392): n is a, c, g, or t
  misc_feature (1395)..(1395): n is a, c, g, or t
  misc_feature (1401)..(1401): n is a, c, g, or t
  misc_feature (1404)..(1404): n is a, c, g, or t
  misc_feature (1407)..(1407): n is a, c, g, or t
  misc_feature (1416)..(1416): n is a, c, g, or t
  misc_feature (1419)..(1419): n is a, c, g, or t
  misc_feature (1425)..(1425): n is a, c, g, or t
  misc_feature (1428)..(1428): n is a, c, g, or t
  misc_feature (1434)..(1434): n is a, c, g, or t
  misc_feature (1440)..(1440): n is a, c, g, or t
  misc_feature (1443)..(1443): n is a, c, g, or t
  misc_feature (1446)..(1446): n is a, c, g, or t
  misc_feature (1449)..(1449): n is a, c, g, or t
  misc_feature (1455)..(1455): n is a, c, g, or t
  misc_feature (1458)..(1458): n is a, c, g, or t
  misc_feature (1461)..(1461): n is a, c, g, or t
  misc_feature (1467)..(1467): n is a, c, g, or t
  misc_feature (1470)..(1470): n is a, c, g, or t
  misc_feature (1479)..(1479): n is a, c, g, or t
  misc_feature (1482)..(1482): n is a, c, g, or t
  misc_feature (1485)..(1485): n is a, c, g, or t
  misc_feature (1488)..(1488): n is a, c, g, or t
  misc_feature (1491)..(1491): n is a, c, g, or t
  misc_feature (1494)..(1494): n is a, c, g, or t
  misc_feature (1500)..(1500): n is a, c, g, or t
  misc_feature (1503)..(1503): n is a, c, g, or t
  misc_feature (1506)..(1506): n is a, c, g, or t
  misc_feature (1509)..(1509): n is a, c, g, or t
  misc_feature (1512)..(1512): n is a, c, g, or t
  misc_feature (1515)..(1515): n is a, c, g, or t
  misc_feature (1518)..(1518): n is a, c, g, or t
  misc_feature (1521)..(1521): n is a, c, g, or t
  misc_feature (1524)..(1524): n is a, c, g, or t
  misc_feature (1527)..(1527): n is a, c, g, or t
  misc_feature (1530)..(1530): n is a, c, g, or t
  misc_feature (1533)..(1533): n is a, c, g, or t
  misc_feature (1536)..(1536): n is a, c, g, or t
  misc_feature (1539)..(1539): n is a, c, g, or t
  misc_feature (1542)..(1542): n is a, c, g, or t
  misc_feature (1554)..(1554): n is a, c, g, or t
  misc_feature (1557)..(1557): n is a, c, g, or t
  misc_feature (1566)..(1566): n is a, c, g, or t
  misc_feature (1569)..(1569): n is a, c, g, or t
  misc_feature (1572)..(1572): n is a, c, g, or t
  misc_feature (1575)..(1575): n is a, c, g, or t
  misc_feature (1581)..(1581): n is a, c, g, or t
  misc_feature (1584)..(1584): n is a, c, g, or t
  misc_feature (1590)..(1590): n is a, c, g, or t
  misc_feature (1593)..(1593): n is a, c, g, or t
  misc_feature (1596)..(1596): n is a, c, g, or t
  misc_feature (1599)..(1599): n is a, c, g, or t
  misc_feature (1605)..(1605): n is a, c, g, or t
  misc_feature (1611)..(1611): n is a, c, g, or t
  misc_feature (1614)..(1614): n is a, c, g, or t
  misc_feature (1617)..(1617): n is a, c, g, or t
  misc_feature (1620)..(1620): n is a, c, g, or t
  misc_feature (1629)..(1629): n is a, c, g, or t
  misc_feature (1632)..(1632): n is a, c, g, or t
  misc_feature (1638)..(1638): n is a, c, g, or t
  misc_feature (1641)..(1641): n is a, c, g, or t
  misc_feature (1644)..(1644): n is a, c, g, or t
  misc_feature (1647)..(1647): n is a, c, g, or t
  misc_feature (1650)..(1650): n is a, c, g, or t
  misc_feature (1653)..(1653): n is a, c, g, or t
  misc_feature (1656)..(1656): n is a, c, g, or t
  misc_feature (1662)..(1662): n is a, c, g, or t
  misc_feature (1665)..(1665): n is a, c, g, or t
  misc_feature (1668)..(1668): n is a, c, g, or t
  misc_feature (1671)..(1671): n is a, c, g, or t
  misc_feature (1677)..(1677): n is a, c, g, or t
  misc_feature (1689)..(1689): n is a, c, g, or t
  misc_feature (1695)..(1695): n is a, c, g, or t
  misc_feature (1698)..(1698): n is a, c, g, or t
  misc_feature (1701)..(1701): n is a, c, g, or t
  misc_feature (1704)..(1704): n is a, c, g, or t
  misc_feature (1713)..(1713): n is a, c, g, or t
  misc_feature (1716)..(1716): n is a, c, g, or t
  misc_feature (1722)..(1722): n is a, c, g, or t
  misc_feature (1725)..(1725): n is a, c, g, or t
  misc_feature (1731)..(1731): n is a, c, g, or t
  misc_feature (1734)..(1734): n is a, c, g, or t
  misc_feature (1737)..(1737): n is a, c, g, or t
  misc_feature (1740)..(1740): n is a, c, g, or t
  misc_feature (1743)..(1743): n is a, c, g, or t
  misc_feature (1746)..(1746): n is a, c, g, or t
  misc_feature (1752)..(1752): n is a, c, g, or t
  misc_feature (1755)..(1755): n is a, c, g, or t
  misc_feature (1761)..(1761): n is a, c, g, or t
  misc_feature (1776)..(1776): n is a, c, g, or t
  misc_feature (1779)..(1779): n is a, c, g, or t
  misc_feature (1782)..(1782): n is a, c, g, or t
  misc_feature (1788)..(1788): n is a, c, g, or t
  misc_feature (1791)..(1791): n is a, c, g, or t
  misc_feature (1797)..(1797): n is a, c, g, or t
  misc_feature (1800)..(1800): n is a, c, g, or t
  misc_feature (1803)..(1803): n is a, c, g, or t
  misc_feature (1809)..(1809): n is a, c, g, or t
  misc_feature (1812)..(1812): n is a, c, g, or t
  misc_feature (1815)..(1815): n is a, c, g, or t
  misc_feature (1818)..(1818): n is a, c, g, or t
  misc_feature (1824)..(1824): n is a, c, g, or t
  misc_feature (1827)..(1827): n is a, c, g, or t
  misc_feature (1833)..(1833): n is a, c, g, or t
  misc_feature (1839)..(1839): n is a, c, g, or t
  misc_feature (1842)..(1842): n is a, c, g, or t
  misc_feature (1845)..(1845): n is a, c, g, or t
  misc_feature (1854)..(1854): n is a, c, g, or t
  misc_feature (1857)..(1857): n is a, c, g, or t
  misc_feature (1866)..(1866): n is a, c, g, or t
  misc_feature (1875)..(1875): n is a, c, g, or t
  misc_feature (1881)..(1881): n is a, c, g, or t
  misc_feature (1884)..(1884): n is a, c, g, or t
  misc_feature (1887)..(1887): n is a, c, g, or t
  misc_feature (1890)..(1890): n is a, c, g, or t
  misc_feature (1905)..(1905): n is a, c, g, or t
  misc_feature (1908)..(1908): n is a, c, g, or t
  misc_feature (1911)..(1911): n is a, c, g, or t
  misc_feature (1920)..(1920): n is a, c, g, or t
  misc_feature (1923)..(1923): n is a, c, g, or t
  misc_feature (1926)..(1926): n is a, c, g, or t
  misc_feature (1929)..(1929): n is a, c, g, or t
  misc_feature (1935)..(1935): n is a, c, g, or t
  misc_feature (1938)..(1938): n is a, c, g, or t
  misc_feature (1941)..(1941): n is a, c, g, or t
  misc_feature (1953)..(1953): n is a, c, g, or t
  misc_feature (1965)..(1965): n is a, c, g, or t
  misc_feature (1977)..(1977): n is a, c, g, or t
  misc_feature (1983)..(1983): n is a, c, g, or t
  misc_feature (1986)..(1986): n is a, c, g, or t
  misc_feature (1989)..(1989): n is a, c, g, or t
  misc_feature (1992)..(1992): n is a, c, g, or t
  misc_feature (2007)..(2007): n is a, c, g, or t
  misc_feature (2010)..(2010): n is a, c, g, or t
  misc_feature (2019)..(2019): n is a, c, g, or t
  misc_feature (2022)..(2022): n is a, c, g, or t
  misc_feature (2025)..(2025): n is a, c, g, or t
  misc_feature (2028)..(2028): n is a, c, g, or t
atgccnwsntgggcnytnttyatggtnacnwsntgyytnytnytngcnccncaraayytngcncargtnwsnwsncargaygtnwsnytnytngcnwsngaywsngarccnytnaartgyttywsnmgnacnttygargayytnacntgyttytgggaygargargargcngcnccnwsnggnacntaycarytnytntaygcntayccnmgngaraarccnmgngcntgyccnytnwsnwsncarwsnatgccncayttyggnacnmgntaygtntgycarttyccngaycargargargtnmgnytnttyttyccnytncayytntgggtnaaraaygtnttyytnaaycaracnmgnacncarmgngtnytnttygtngaywsngtnggnytnccngcnccnccnwsnathathaargcnatgggnggnwsncarccnggngarytncarathwsntgggargarccngcnccngarathwsngayttyytnmgntaygarytnmgntayggnccnmgngayccnaaraaywsnacnggnccnacngtnathcarytnathgcnacngaracntgytgyccngcnytncarmgnccncaywsngcnwsngcnytngaycarwsnccntgygcncarccnacnatgccntggcargayggnccnaarcaracnwsnccnwsnmgngargcnwsngcnytnacngcngarggnggnwsntgyytnathwsnggnytncarccnggnaaywsntaytggytncarytnmgnwsngarccngayggnathwsnytnggnggnwsntggggnwsntggwsnytnccngtnacngtngayytnccnggngaygcngtngcnytnggnytncartgyttyacnytngayytnaaraaygtnacntgycartggcarcarcargaycaygcnwsnwsncarggnttyttytaycaywsnmgngcnmgntgytgyccnmgngaymgntayccnathtgggaraaytgygargargargaraaracnaayccnggnytncaracnccncarttywsnmgntgycayttyaarwsnmgnaaygaywsnathathcayathytngtngargtnacnacngcnccnggnacngtncaywsntayytnggnwsnccnttytggathcaycargcngtnmgnytnccnacnccnaayytncaytggmgngarathwsnwsnggncayytngarytngartggcarcayccnwsnwsntgggcngcncargaracntgytaycarytnmgntayacnggngarggncaycargaytggaargtnytngarccnccnytnggngcnmgnggnggnacnytngarytnmgnccnmgnwsnmgntaymgnytncarytnmgngcnmgnytnaayggnccnacntaycarggnccntggwsnwsntggwsngayccnacnmgngtngaracngcnacngaracngcntggathwsnytngtnacngcnytncayytngtnytnggnytnwsngcngtnytnggnytnytnytnytnmgntggcarttyccngcncaytaymgnmgnytnmgncaygcnytntggccnwsnytnccngayytncaymgngtnytnggncartayytnmgngayacngcngcnytnwsnccnccnaargcnacngtnwsngayacntgygargargtngarccnwsnytnytngarathytnccnaarwsnwsngarmgnacnccnytnccnytntgywsnwsncargcncaratggaytaymgnmgnytncarccnwsntgyytnggnacnatgccnytnwsngtntgyccnccnatggcngarwsnggnwsntgytgyacnacncayathgcnaaycaywsntayytnccnytnwsntaytggcarcarccnmgngtnaarttywsnmgnwsngcngaygcnccngcntaycarcarggncaraaycarytntayaaygarytnaayytnggnmgnmgngargartaygaygtnytngayaarmgnmgnggnmgntrrtrr

SEQ ID NO: 25 - DNA, 2514 bp, Artificial Sequence
  TpoR.TpoR-cyt.LMP1-cyt
  misc_feature (6)..(6): n is a, c, g, or t
  misc_feature (9)..(9): n is a, c, g, or t
  misc_feature (15)..(15): n is a, c, g, or t
  misc_feature (18)..(18): n is a, c, g, or t
  misc_feature (27)..(27): n is a, c, g, or t
  misc_feature (30)..(30): n is a, c, g, or t
  misc_feature (33)..(33): n is a, c, g, or t
  misc_feature (39)..(39): n is a, c, g, or t
  misc_feature (42)..(42): n is a, c, g, or t
  misc_feature (45)..(45): n is a, c, g, or t
  misc_feature (48)..(48): n is a, c, g, or t
  misc_feature (51)..(51): n is a, c, g, or t
  misc_feature (60)..(60): n is a, c, g, or t
  misc_feature (63)..(63): n is a, c, g, or t
  misc_feature (69)..(69): n is a, c, g, or t
  misc_feature (72)..(72): n is a, c, g, or t
  misc_feature (75)..(75): n is a, c, g, or t
  misc_feature (84)..(84): n is a, c, g, or t
  misc_feature (87)..(87): n is a, c, g, or t
  misc_feature (90)..(90): n is a, c, g, or t
  misc_feature (93)..(93): n is a, c, g, or t
  misc_feature (96)..(96): n is a, c, g, or t
  misc_feature (99)..(99): n is a, c, g, or t
  misc_feature (105)..(105): n is a, c, g, or t
  misc_feature (111)..(111): n is a, c, g, or t
  misc_feature (114)..(114): n is a, c, g, or t
  misc_feature (126)..(126): n is a, c, g, or t
  misc_feature (129)..(129): n is a, c, g, or t
  misc_feature (132)..(132): n is a, c, g, or t
  misc_feature (144)..(144): n is a, c, g, or t
  misc_feature (147)..(147): n is a, c, g, or t
  misc_feature (171)..(171): n is a, c, g, or t
  misc_feature (174)..(174): n is a, c, g, or t
  misc_feature (177)..(177): n is a, c, g, or t
  misc_feature (180)..(180): n is a, c, g, or t
  misc_feature (183)..(183): n is a, c, g, or t
  misc_feature (186)..(186): n is a, c, g, or t
  misc_feature (195)..(195): n is a, c, g, or t
  misc_feature (198)..(198): n is a, c, g, or t
  misc_feature (204)..(204): n is a, c, g, or t
  misc_feature (210)..(210): n is a, c, g, or t
  misc_feature (213)..(213): n is a, c, g, or t
  misc_feature (222)..(222): n is a, c, g, or t
  misc_feature (225)..(225): n is a, c, g, or t
  misc_feature (228)..(228): n is a, c, g, or t
  misc_feature (234)..(234): n is a, c, g, or t
  misc_feature (237)..(237): n is a, c, g, or t
  misc_feature (240)..(240): n is a, c, g, or t
  misc_feature (243)..(243): n is a, c, g, or t
  misc_feature (249)..(249): n is a, c, g, or t
  misc_feature (255)..(255): n is a, c, g, or t
  misc_feature (264)..(264): n is a, c, g, or t
  misc_feature (267)..(267): n is a, c, g, or t
  misc_feature (270)..(270): n is a, c, g, or t
  misc_feature (276)..(276): n is a, c, g, or t
  misc_feature (288)..(288): n is a, c, g, or t
  misc_feature (303)..(303): n is a, c, g, or t
  misc_feature (306)..(306): n is a, c, g, or t
  misc_feature (309)..(309): n is a, c, g, or t
  misc_feature (318)..(318): n is a, c, g, or t
  misc_feature (321)..(321): n is a, c, g, or t
  misc_feature (327)..(327): n is a, c, g, or t
  misc_feature (333)..(333): n is a, c, g, or t
  misc_feature (342)..(342): n is a, c, g, or t
  misc_feature (348)..(348): n is a, c, g, or t
  misc_feature (357)..(357): n is a, c, g, or t
  misc_feature (360)..(360): n is a, c, g, or t
  misc_feature (363)..(363): n is a, c, g, or t
  misc_feature (369)..(369): n is a, c, g, or t
  misc_feature (372)..(372): n is a, c, g, or t
  misc_feature (375)..(375): n is a, c, g, or t
  misc_feature (381)..(381): n is a, c, g, or t
  misc_feature (387)..(387): n is a, c, g, or t
  misc_feature (390)..(390): n is a, c, g, or t
  misc_feature (393)..(393): n is a, c, g, or t
  misc_feature (396)..(396): n is a, c, g, or t
  misc_feature (399)..(399): n is a, c, g, or t
  misc_feature (402)..(402): n is a, c, g, or t
  misc_feature (405)..(405): n is a, c, g, or t
  misc_feature (408)..(408): n is a, c, g, or t
  misc_feature (411)..(411): n is a, c, g, or t
  misc_feature (423)..(423): n is a, c, g, or t
  misc_feature (429)..(429): n is a, c, g, or t
  misc_feature (432)..(432): n is a, c, g, or t
  misc_feature (435)..(435): n is a, c, g, or t
  misc_feature (441)..(441): n is a, c, g, or t
  misc_feature (444)..(444): n is a, c, g, or t
  misc_feature (450)..(450): n is a, c, g, or t
  misc_feature (459)..(459): n is a, c, g, or t
  misc_feature (471)..(471): n is a, c, g, or t
  misc_feature (474)..(474): n is a, c, g, or t
  misc_feature (477)..(477): n is a, c, g, or t
  misc_feature (486)..(486): n is a, c, g, or t
  misc_feature (495)..(495): n is a, c, g, or t
  misc_feature (498)..(498): n is a, c, g, or t
  misc_feature (507)..(507): n is a, c, g, or t
  misc_feature (510)..(510): n is a, c, g, or t
  misc_feature (516)..(516): n is a, c, g, or t
  misc_feature (519)..(519): n is a, c, g, or t
  misc_feature (522)..(522): n is a, c, g, or t
  misc_feature (528)..(528): n is a, c, g, or t
  misc_feature (537)..(537): n is a, c, g, or t
  misc_feature (540)..(540): n is a, c, g, or t
  misc_feature (543)..(543): n is a, c, g, or t
  misc_feature (546)..(546): n is a, c, g, or t
  misc_feature (549)..(549): n is a, c, g, or t
  misc_feature (552)..(552): n is a, c, g, or t
  misc_feature (561)..(561): n is a, c, g, or t
  misc_feature (567)..(567): n is a, c, g, or t
  misc_feature (570)..(570): n is a, c, g, or t
  misc_feature (576)..(576): n is a, c, g, or t
  misc_feature (585)..(585): n is a, c, g, or t
  misc_feature (588)..(588): n is a, c, g, or t
  misc_feature (591)..(591): n is a, c, g, or t
  misc_feature (597)..(597): n is a, c, g, or t
  misc_feature (600)..(600): n is a, c, g, or t
  misc_feature (606)..(606): n is a, c, g, or t
  misc_feature (609)..(609): n is a, c, g, or t
  misc_feature (612)..(612): n is a, c, g, or t
  misc_feature (615)..(615): n is a, c, g, or t
  misc_feature (618)..(618): n is a, c, g, or t
  misc_feature (627)..(627): n is a, c, g, or t
  misc_feature (630)..(630): n is a, c, g, or t
  misc_feature (636)..(636): n is a, c, g, or t
  misc_feature (642)..(642): n is a, c, g, or t
  misc_feature (645)..(645): n is a, c, g, or t
  misc_feature (651)..(651): n is a, c, g, or t
  misc_feature (663)..(663): n is a, c, g, or t
  misc_feature (666)..(666): n is a, c, g, or t
  misc_feature (675)..(675): n is a, c, g, or t
  misc_feature (678)..(678): n is a, c, g, or t
  misc_feature (681)..(681): n is a, c, g, or t
  misc_feature (684)..(684): n is a, c, g, or t
  misc_feature (687)..(687): n is a, c, g, or t
  misc_feature (693)..(693): n is a, c, g, or t
  misc_feature (696)..(696): n is a, c, g, or t
  misc_feature (699)..(699): n is a, c, g, or t
  misc_feature (702)..(702): n is a, c, g, or t
  misc_feature (705)..(705): n is a, c, g, or t
  misc_feature (708)..(708): n is a, c, g, or t
  misc_feature (714)..(714): n is a, c, g, or t
  misc_feature (717)..(717): n is a, c, g, or t
  misc_feature (720)..(720): n is a, c, g, or t
  misc_feature (726)..(726): n is a, c, g, or t
  misc_feature (732)..(732): n is a, c, g, or t
  misc_feature (735)..(735): n is a, c, g, or t
  misc_feature (738)..(738): n is a, c, g, or t
  misc_feature (744)..(744): n is a, c, g, or t
  misc_feature (747)..(747): n is a, c, g, or t
  misc_feature (753)..(753): n is a, c, g, or t
  misc_feature (762)..(762): n is a, c, g, or t
  misc_feature (768)..(768): n is a, c, g, or t
  misc_feature (771)..(771): n is a, c, g, or t
  misc_feature (774)..(774): n is a, c, g, or t
  misc_feature (780)..(780): n is a, c, g, or t
  misc_feature (786)..(786): n is a, c, g, or t
  misc_feature (792)..(792): n is a, c, g, or t
  misc_feature (795)..(795): n is a, c, g, or t
  misc_feature (798)..(798): n is a, c, g, or t
  misc_feature (801)..(801): n is a, c, g, or t
  misc_feature (804)..(804): n is a, c, g, or t
  misc_feature (810)..(810): n is a, c, g, or t
  misc_feature (813)..(813): n is a, c, g, or t
  misc_feature (819)..(819): n is a, c, g, or t
  misc_feature (822)..(822): n is a, c, g, or t
  misc_feature (825)..(825): n is a, c, g, or t
  misc_feature (828)..(828): n is a, c, g, or t
  misc_feature (831)..(831): n is a, c, g, or t
  misc_feature (834)..(834): n is a, c, g, or t
  misc_feature (840)..(840): n is a, c, g, or t
  misc_feature (843)..(843): n is a, c, g, or t
  misc_feature (846)..(846): n is a, c, g, or t
  misc_feature (852)..(852): n is a, c, g, or t
  misc_feature (855)..(855): n is a, c, g, or t
  misc_feature (858)..(858): n is a, c, g, or t
  misc_feature (861)..(861): n is a, c, g, or t
  misc_feature (864)..(864): n is a, c, g, or t
  misc_feature (867)..(867): n is a, c, g, or t
  misc_feature (879)..(879): n is a, c, g, or t
  misc_feature (882)..(882): n is a, c, g, or t
  misc_feature (888)..(888): n is a, c, g, or t
  misc_feature (897)..(897): n is a, c, g, or t
  misc_feature (900)..(900): n is a, c, g, or t
  misc_feature (927)..(927): n is a, c, g, or t
  misc_feature (930)..(930): n is a, c, g, or t
  misc_feature (933)..(933): n is a, c, g, or t
  misc_feature (939)..(939): n is a, c, g, or t
  misc_feature (954)..(954): n is a, c, g, or t
  misc_feature (957)..(957): n is a, c, g, or t
  misc_feature (960)..(960): n is a, c, g, or t
  misc_feature (963)..(963): n is a, c, g, or t
  misc_feature (972)..(972): n is a, c, g, or t
  misc_feature (975)..(975): n is a, c, g, or t
  misc_feature (981)..(981): n is a, c, g, or t
  misc_feature (987)..(987): n is a, c, g, or t
  misc_feature (1020)..(1020): n is a, c, g, or t
  misc_feature (1026)..(1026): n is a, c, g, or t
  misc_feature (1029)..(1029): n is a, c, g, or t
  misc_feature (1032)..(1032): n is a, c, g, or t
  misc_feature (1038)..(1038): n is a, c, g, or t
  misc_feature (1041)..(1041): n is a, c, g, or t
  misc_feature (1050)..(1050): n is a, c, g, or t
  misc_feature (1053)..(1053): n is a, c, g, or t
  misc_feature (1068)..(1068): n is a, c, g, or t
  misc_feature (1071)..(1071): n is a, c, g, or t
  misc_feature (1080)..(1080): n is a, c, g, or t
  misc_feature (1095)..(1095): n is a, c, g, or t
  misc_feature (1098)..(1098): n is a, c, g, or t
  misc_feature (1104)..(1104): n is a, c, g, or t
  misc_feature (1107)..(1107): n is a, c, g, or t
  misc_feature (1110)..(1110): n is a, c, g, or t
  misc_feature (1113)..(1113): n is a, c, g, or t
  misc_feature (1116)..(1116): n is a, c, g, or t
  misc_feature (1119)..(1119): n is a, c, g, or t
  misc_feature (1122)..(1122): n is a, c, g, or t
  misc_feature (1125)..(1125): n is a, c, g, or t
  misc_feature (1131)..(1131): n is a, c, g, or t
  misc_feature (1137)..(1137): n is a, c, g, or t
  misc_feature (1140)..(1140): n is a, c, g, or t
  misc_feature (1143)..(1143): n is a, c, g, or t
  misc_feature (1146)..(1146): n is a, c, g, or t
  misc_feature (1164)..(1164): n is a, c, g, or t
  misc_feature (1167)..(1167): n is a, c, g, or t
  misc_feature (1170)..(1170): n is a, c, g, or t
  misc_feature (1173)..(1173): n is a, c, g, or t
  misc_feature (1176)..(1176): n is a, c, g, or t
  misc_feature (1179)..(1179): n is a, c, g, or t
  misc_feature (1182)..(1182): n is a, c, g, or t
  misc_feature (1188)..(1188): n is a, c, g, or t
  misc_feature (1197)..(1197): n is a, c, g, or t
  misc_feature (1206)..(1206): n is a, c, g, or t
  misc_feature (1209)..(1209): n is a, c, g, or t
  misc_feature (1212)..(1212): n is a, c, g, or t
  misc_feature (1218)..(1218): n is a, c, g, or t
  misc_feature (1224)..(1224): n is a, c, g, or t
  misc_feature (1239)..(1239): n is a, c, g, or t
  misc_feature (1242)..(1242): n is a, c, g, or t
  misc_feature (1245)..(1245): n is a, c, g, or t
  misc_feature (1251)..(1251): n is a, c, g, or t
  misc_feature (1254)..(1254): n is a, c, g, or t
  misc_feature (1263)..(1263): n is a, c, g, or t
  misc_feature (1275)..(1275): n is a, c, g, or t
  misc_feature (1278)..(1278): n is a, c, g, or t
  misc_feature (1284)..(1284): n is a, c, g, or t
  misc_feature (1287)..(1287): n is a, c, g, or t
  misc_feature (1293)..(1293): n is a, c, g, or t
  misc_feature (1311)..(1311): n is a, c, g, or t
  misc_feature (1314)..(1314): n is a, c, g, or t
  misc_feature (1320)..(1320): n is a, c, g, or t
  misc_feature (1323)..(1323): n is a, c, g, or t
  misc_feature (1326)..(1326): n is a, c, g, or t
  misc_feature (1329)..(1329): n is a, c, g, or t
  misc_feature (1332)..(1332): n is a, c, g, or t
  misc_feature (1335)..(1335): n is a, c, g, or t
  misc_feature (1338)..(1338): n is a, c, g, or t
  misc_feature (1341)..(1341): n is a, c, g, or t
  misc_feature (1344)..(1344): n is a, c, g, or t
  misc_feature (1347)..(1347): n is a, c, g, or t
  misc_feature (1353)..(1353): n is a, c, g, or t
  misc_feature (1356)..(1356): n is a, c, g, or t
  misc_feature (1359)..(1359): n is a, c, g, or t
  misc_feature (1362)..(1362): n is a, c, g, or t
  misc_feature (1365)..(1365): n is a, c, g, or t
  misc_feature (1368)..(1368): n is a, c, g, or t
  misc_feature (1374)..(1374): n is a, c, g, or t
  misc_feature (1377)..(1377): n is a, c, g, or t
  misc_feature (1383)..(1383): n is a, c, g, or t
  misc_feature (1386)..(1386): n is a, c, g, or t
  misc_feature (1389)..(1389): n is a, c, g, or t
  misc_feature (1392)..(1392): n is a, c, g, or t
  misc_feature (1395)..(1395): n is a, c, g, or t
  misc_feature (1401)..(1401): n is a, c, g, or t
  misc_feature (1404)..(1404): n is a, c, g, or t
  misc_feature (1407)..(1407): n is a, c, g, or t
  misc_feature (1416)..(1416): n is a, c, g, or t
  misc_feature (1419)..(1419): n is a, c, g, or t
  misc_feature (1425)..(1425): n is a, c, g, or t
  misc_feature (1428)..(1428): n is a, c, g, or t
  misc_feature (1434)..(1434): n is a, c, g, or t
  misc_feature (1440)..(1440): n is a, c, g, or t
  misc_feature (1443)..(1443): n is a, c, g, or t
  misc_feature (1446)..(1446): n is a, c, g, or t
  misc_feature (1449)..(1449): n is a, c, g, or t
  misc_feature (1455)..(1455): n is a, c, g, or t
  misc_feature (1458)..(1458): n is a, c, g, or t
  misc_feature (1461)..(1461): n is a, c, g, or t
  misc_feature (1467)..(1467): n is a, c, g, or t
  misc_feature (1470)..(1470): n is a, c, g, or t
  misc_feature (1479)..(1479): n is a, c, g, or t
  misc_feature (1482)..(1482): n is a, c, g, or t
  misc_feature (1485)..(1485): n is a, c, g, or t
  misc_feature (1488)..(1488): n is a, c, g, or t
  misc_feature (1491)..(1491): n is a, c, g, or t
  misc_feature (1494)..(1494): n is a, c, g, or t
  misc_feature (1500)..(1500): n is a, c, g, or t
  misc_feature (1503)..(1503): n is a, c, g, or t
  misc_feature (1506)..(1506): n is a, c, g, or t
  misc_feature (1509)..(1509): n is a, c, g, or t
  misc_feature (1512)..(1512): n is a, c, g, or t
  misc_feature (1515)..(1515): n is a, c, g, or t
  misc_feature (1518)..(1518): n is a, c, g, or t
  misc_feature (1521)..(1521): n is a, c, g, or t
  misc_feature (1524)..(1524): n is a, c, g, or t
  misc_feature (1527)..(1527): n is a, c, g, or t
  misc_feature (1530)..(1530): n is a, c, g, or t
  misc_feature (1533)..(1533): n is a, c, g, or t
  misc_feature (1536)..(1536): n is a, c, g, or t
  misc_feature (1539)..(1539): n is a, c, g, or t
  misc_feature (1542)..(1542): n is a, c, g, or t
  misc_feature (1554)..(1554): n is a, c, g, or t
  misc_feature (1557)..(1557): n is a, c, g, or t
  misc_feature (1566)..(1566): n is a, c, g, or t
  misc_feature (1569)..(1569): n is a, c, g, or t
  misc_feature (1572)..(1572): n is a, c, g, or t
  misc_feature (1575)..(1575): n is a, c, g, or t
  misc_feature (1581)..(1581): n is a, c, g, or t
  misc_feature (1584)..(1584): n is a, c, g, or t
  misc_feature (1590)..(1590): n is a, c, g, or t
  misc_feature (1593)..(1593): n is a, c, g, or t
  misc_feature (1596)..(1596): n is a, c, g, or t
  misc_feature (1599)..(1599): n is a, c, g, or t
  misc_feature (1605)..(1605): n is a, c, g, or t
  misc_feature (1611)..(1611): n is a, c, g, or t
  misc_feature (1614)..(1614): n is a, c, g, or t
  misc_feature (1617)..(1617): n is a, c, g, or t
  misc_feature (1620)..(1620): n is a, c, g, or t
  misc_feature (1629)..(1629): n is a, c, g, or t
  misc_feature (1632)..(1632): n is a, c, g, or t
  misc_feature (1638)..(1638): n is a, c, g, or t
  misc_feature (1641)..(1641): n is a, c, g, or t
  misc_feature (1644)..(1644): n is a, c, g, or t
  misc_feature (1647)..(1647): n is a, c, g, or t
  misc_feature (1650)..(1650): n is a, c, g, or t
  misc_feature (1653)..(1653): n is a, c, g, or t
  misc_feature (1656)..(1656): n is a, c, g, or t
  misc_feature (1662)..(1662): n is a, c, g, or t
  misc_feature (1665)..(1665): n is a, c, g, or t
  misc_feature (1668)..(1668): n is a, c, g, or t
  misc_feature (1671)..(1671): n is a, c, g, or t
  misc_feature (1677)..(1677): n is a, c, g, or t
  misc_feature (1689)..(1689): n is a, c, g, or t
  misc_feature (1695)..(1695): n is a, c, g, or t
  misc_feature (1698)..(1698): n is a, c, g, or t
  misc_feature (1701)..(1701): n is a, c, g, or t
  misc_feature (1704)..(1704): n is a, c, g, or t
  misc_feature (1713)..(1713): n is a, c, g, or t
  misc_feature (1716)..(1716): n is a, c, g, or t
  misc_feature (1722)..(1722): n is a, c, g, or t
  misc_feature (1725)..(1725): n is a, c, g, or t
  misc_feature (1731)..(1731): n is a, c, g, or t
  misc_feature (1734)..(1734): n is a, c, g, or t
  misc_feature (1737)..(1737): n is a, c, g, or t
  misc_feature (1740)..(1740): n is a, c, g, or t
  misc_feature (1743)..(1743): n is a, c, g, or t
  misc_feature (1746)..(1746): n is a, c, g, or t
  misc_feature (1752)..(1752): n is a, c, g, or t
  misc_feature (1755)..(1755): n is a, c, g, or t
  misc_feature (1761)..(1761): n is a, c, g, or t
  misc_feature (1776)..(1776): n is a, c, g, or t
  misc_feature (1779)..(1779): n is a, c, g, or t
  misc_feature (1782)..(1782): n is a, c, g, or t
  misc_feature (1788)..(1788): n is a, c, g, or t
  misc_feature (1791)..(1791): n is a, c, g, or t
  misc_feature (1797)..(1797): n is a, c, g, or t
  misc_feature (1800)..(1800): n is a, c, g, or t
  misc_feature (1803)..(1803): n is a, c, g, or t
  misc_feature (1809)..(1809): n is a, c, g, or t
  misc_feature (1812)..(1812): n is a, c, g, or t
  misc_feature (1815)..(1815): n is a, c, g, or t
  misc_feature (1818)..(1818): n is a, c, g, or t
  misc_feature (1824)..(1824): n is a, c, g, or t
  misc_feature (1827)..(1827): n is a, c, g, or t
  misc_feature (1833)..(1833): n is a, c, g, or t
  misc_feature (1839)..(1839): n is a, c, g, or t
  misc_feature (1842)..(1842): n is a, c, g, or t
  misc_feature (1845)..(1845): n is a, c, g, or t
  misc_feature (1854)..(1854): n is a, c, g, or t
  misc_feature (1857)..(1857): n is a, c, g, or t
  misc_feature (1866)..(1866): n is a, c, g, or t
  misc_feature (1875)..(1875): n is a, c, g, or t
  misc_feature (1881)..(1881): n is a, c, g, or t
  misc_feature (1884)..(1884): n is a, c, g, or t
  misc_feature (1887)..(1887): n is a, c, g, or t
  misc_feature (1890)..(1890): n is a, c, g, or t
  misc_feature (1905)..(1905): n is a, c, g, or t
  misc_feature (1914)..(1914): n is a, c, g, or t
  misc_feature (1920)..(1920): n is a, c, g, or t
  misc_feature (1926)..(1926): n is a, c, g, or t
  misc_feature (1950)..(1950): n is a, c, g, or t
  misc_feature (1953)..(1953): n is a, c, g, or t
  misc_feature (1956)..(1956): n is a, c, g, or t
  misc_feature (1962)..(1962): n is a, c, g, or t
  misc_feature (1971)..(1971): n is a, c, g, or t
  misc_feature (1974)..(1974): n is a, c, g, or t
  misc_feature (1983)..(1983): n is a, c, g, or t
  misc_feature (1986)..(1986): n is a, c, g, or t
  misc_feature (1995)..(1995): n is a, c, g, or t
  misc_feature (2001)..(2001): n is a, c, g, or t
  misc_feature (2007)..(2007): n is a, c, g, or t
  misc_feature (2016)..(2016): n is a, c, g, or t
  misc_feature (2019)..(2019): n is a, c, g, or t
  misc_feature (2028)..(2028): n is a, c, g, or t
  misc_feature (2031)..(2031): n is a, c, g, or t
  misc_feature (2034)..(2034): n is a, c, g, or t
  misc_feature (2037)..(2037): n is a, c, g, or t
  misc_feature (2040)..(2040): n is a, c, g, or t
  misc_feature (2043)..(2043): n is a, c, g, or t
  misc_feature (2046)..(2046): n is a, c, g, or t
  misc_feature (2052)..(2052): n is a, c, g, or t
  misc_feature (2055)..(2055): n is a, c, g, or t
  misc_feature (2058)..(2058): n is a, c, g, or t
  misc_feature (2061)..(2061): n is a, c, g, or t
  misc_feature (2067)..(2067): n is a, c, g, or t
  misc_feature (2076)..(2076): n is a, c, g, or t
  misc_feature (2079)..(2079): n is a, c, g, or t
  misc_feature (2082)..(2082): n is a, c, g, or t
  misc_feature (2085)..(2085): n is a, c, g, or t
  misc_feature (2088)..(2088): n is a, c, g, or t
  misc_feature (2091)..(2091): n is a, c, g, or t
  misc_feature (2094)..(2094): n is a, c, g, or t
  misc_feature (2097)..(2097): n is a, c, g, or t
  misc_feature (2106)..(2106): n is a, c, g, or t
  misc_feature (2109)..(2109): n is a, c, g, or t
  misc_feature (2118)..(2118): n is a, c, g, or t
  misc_feature (2127)..(2127): n is a, c, g, or t
  misc_feature (2139)..(2139): n is a, c, g, or t
  misc_feature (2142)..(2142): n is a, c, g, or t
  misc_feature (2151)..(2151): n is a, c, g, or t
  misc_feature (2160)..(2160): n is a, c, g, or t
  misc_feature (2172)..(2172): n is a, c, g, or t
  misc_feature (2175)..(2175): n is a, c, g, or t
  misc_feature (2184)..(2184): n is a, c, g, or t
  misc_feature (2187)..(2187): n is a, c, g, or t
  misc_feature (2190)..(2190): n is a, c, g, or t
  misc_feature (2199)..(2199): n is a, c, g, or t
  misc_feature (2208)..(2208): n is a, c, g, or t
  misc_feature (2220)..(2220): n is a, c, g, or t
  misc_feature (2223)..(2223): n is a, c, g, or t
  misc_feature (2232)..(2232): n is a, c, g, or t
  misc_feature (2241)..(2241): n is a, c, g, or t
  misc_feature (2253)..(2253): n is a, c, g, or t
  misc_feature (2256)..(2256): n is a, c, g, or t
  misc_feature (2265)..(2265): n is a, c, g, or t
  misc_feature (2268)..(2268): n is a, c, g, or t
  misc_feature (2271)..(2271): n is a, c, g, or t
  misc_feature (2277)..(2277): n is a, c, g, or t
  misc_feature (2280)..(2280): n is a, c, g, or t
  misc_feature (2283)..(2283): n is a, c, g, or t
  misc_feature (2289)..(2289): n is a, c, g, or t
  misc_feature (2292)..(2292): n is a, c, g, or t
  misc_feature (2295)..(2295): n is a, c, g, or t
  misc_feature (2304)..(2304): n is a, c, g, or t
  misc_feature (2307)..(2307): n is a, c, g, or t
  misc_feature (2310)..(2310): n is a, c, g, or t
  misc_feature (2313)..(2313): n is a, c, g, or t
  misc_feature (2319)..(2319): n is a, c, g, or t
  misc_feature (2322)..(2322): n is a, c, g, or t
  misc_feature (2331)..(2331): n is a, c, g, or t
  misc_feature (2343)..(2343): n is a, c, g, or t
  misc_feature (2346)..(2346): n is a, c, g, or t
  misc_feature (2355)..(2355): n is a, c, g, or t
  misc_feature (2358)..(2358): n is a, c, g, or t
  misc_feature (2361)..(2361): n is a, c, g, or t
  misc_feature (2364)..(2364): n is a, c, g, or t
  misc_feature (2370)..(2370): n is a, c, g, or t
  misc_feature (2376)..(2376): n is a, c, g, or t
  misc_feature (2379)..(2379): n is a, c, g, or t
  misc_feature (2382)..(2382): n is a, c, g, or t
  misc_feature (2385)..(2385): n is a, c, g, or t
  misc_feature (2391)..(2391): n is a, c, g, or t
  misc_feature (2400)..(2400): n is a, c, g, or t
  misc_feature (2403)..(2403): n is a, c, g, or t
  misc_feature (2409)..(2409): n is a, c, g, or t
  misc_feature (2412)..(2412): n is a, c, g, or t
  misc_feature (2415)..(2415): n is a, c, g, or t
  misc_feature (2421)..(2421): n is a, c, g, or t
  misc_feature (2427)..(2427): n is a, c, g, or t
  misc_feature (2430)..(2430): n is a, c, g, or t
  misc_feature (2433)..(2433): n is a, c, g, or t
  misc_feature (2436)..(2436): n is a, c, g, or t
  misc_feature (2439)..(2439): n is a, c, g, or t
  misc_feature (2442)..(2442): n is a, c, g, or t
  misc_feature (2445)..(2445): n is a, c, g, or t
  misc_feature (2448)..(2448): n is a, c, g, or t
  misc_feature (2451)..(2451): n is a, c, g, or t
  misc_feature (2454)..(2454): n is a, c, g, or t
  misc_feature (2457)..(2457): n is a, c, g, or t
  misc_feature (2460)..(2460): n is a, c, g, or t
  misc_feature (2463)..(2463): n is a, c, g, or t
  misc_feature (2478)..(2478): n is a, c, g, or t
  misc_feature (2484)..(2484): n is a, c, g, or t
  misc_feature (2487)..(2487): n is a, c, g, or t
  misc_feature (2490)..(2490): n is a, c, g, or t
  misc_feature (2496)..(2496): n is a, c, g, or t
  misc_feature (2499)..(2499): n is a, c, g, or t
atgccnwsntgggcnytnttyatggtnacnwsntgyytnytnytngcnccncaraayytngcncargtnwsnwsncargaygtnwsnytnytngcnwsngaywsngarccnytnaartgyttywsnmgnacnttygargayytnacntgyttytgggaygargargargcngcnccnwsnggnacntaycarytnytntaygcntayccnmgngaraarccnmgngcntgyccnytnwsnwsncarwsnatgccncayttyggnacnmgntaygtntgycarttyccngaycargargargtnmgnytnttyttyccnytncayytntgggtnaaraaygtnttyytnaaycaracnmgnacncarmgngtnytnttygtngaywsngtnggnytnccngcnccnccnwsnathathaargcnatgggnggnwsncarccnggngarytncarathwsntgggargarccngcnccngarathwsngayttyytnmgntaygarytnmgntayggnccnmgngayccnaaraaywsnacnggnccnacngtnathcarytnathgcnacngaracntgytgyccngcnytncarmgnccncaywsngcnwsngcnytngaycarwsnccntgygcncarccnacnatgccntggcargayggnccnaarcaracnwsnccnwsnmgngargcnwsngcnytnacngcngarggnggnwsntgyytnathwsnggnytncarccnggnaaywsntaytggytncarytnmgnwsngarccngayggnathwsnytnggnggnwsntggggnwsntggwsnytnccngtnacngtngayytnccnggngaygcngtngcnytnggnytncartgyttyacnytngayytnaaraaygtnacntgycartggcarcarcargaycaygcnwsnwsncarggnttyttytaycaywsnmgngcnmgntgytgyccnmgngaymgntayccnathtgggaraaytgygargargargaraaracnaayccnggnytncaracnccncarttywsnmgntgycayttyaarwsnmgnaaygaywsnathathcayathytngtngargtnacnacngcnccnggnacngtncaywsntayytnggnwsnccnttytggathcaycargcngtnmgnytnccnacnccnaayytncaytggmgngarathwsnwsnggncayytngarytngartggcarcayccnwsnwsntgggcngcncargaracntgytaycarytnmgntayacnggngarggncaycargaytggaargtnytngarccnccnytnggngcnmgnggnggnacnytngarytnmgnccnmgnwsnmgntaymgnytncarytnmgngcnmgnytnaayggnccnacntaycarggnccntggwsnwsntggwsngayccnacnmgngtngaracngcnacngaracngcntggathwsnytngtnacngcnytncayytngtnytnggnytnwsngcngtnytnggnytnytnytnytnmgntggcarttyccngcncaytaymgnmgnytnmgncaygcnytntggccnwsnytnccngayytncaymgngtnytnggncartayytnmgngayacngcngcnytnwsnccnccnaargcnacngtnwsngayacntgygargargtngarccnwsnytnytngarathytnccnaarwsnwsngarmgnacnccnytnccnytntgywsnwsncargcncaratggaytaymgnmgnytncarccnwsntgyytnggnacnatgccnytnwsngtntgyccnccnatggcngarwsnggnwsntgytgyacnacncayathgcnaaycaywsntayytnccnytnwsntaytggcarcarccntaycayggncarmgncaywsngaygarcaycaycaygaygaywsnytnccncayccncarcargcnacngaygaywsnggncaygarwsngaywsnaaywsnaaygarggnmgncaycayytnytngtnwsnggngcnggngayggnccnccnytntgywsncaraayytnggngcnccnggnggnggnccngayaayggnccncargayccngayaayacngaygayaayggnccncargayccngayaayacngaygayaayggnccncaygayccnytnccncargayccngayaayacngaygayaayggnccncargayccngayaayacngaygayaayggnccncaygayccnytnccncaywsnccnwsngaywsngcnggnaaygayggnggnccnccncarytnacngargargtngaraayaarggnggngaycarggnccnccnytnatgacngayggnggnggnggncaywsncaygaywsnggncayggnggnggngayccncayytnccnacnytnytnytnggnwsnwsnggnwsnggnggngaygaygaygayccncayggnccngtncarytnwsntaytaygaytrrtrr

SEQ ID NO: 26 - DNA, 2148 bp, Artificial Sequence
  TpoR.LMP1-cyt
  misc_feature (6)..(6): n is a, c, g, or t
  misc_feature (9)..(9): n is a, c, g, or t
  misc_feature (15)..(15): n is a, c, g, or t
  misc_feature (18)..(18): n is a, c, g, or t
  misc_feature (27)..(27): n is a, c, g, or t
  misc_feature (30)..(30): n is a, c, g, or t
  misc_feature (33)..(33): n is a, c, g, or t
  misc_feature (39)..(39): n is a, c, g, or t
  misc_feature (42)..(42): n is a, c, g, or t
  misc_feature (45)..(45): n is a, c, g, or t
  misc_feature (48)..(48): n is a, c, g, or t
  misc_feature (51)..(51): n is a, c, g, or t
  misc_feature (60)..(60): n is a, c, g, or t
  misc_feature (63)..(63): n is a, c, g, or t
  misc_feature (69)..(69): n is a, c, g, or t
  misc_feature (72)..(72): n is a, c, g, or t
  misc_feature (75)..(75): n is a, c, g, or t
  misc_feature (84)..(84): n is a, c, g, or t
  misc_feature (87)..(87): n is a, c, g, or t
  misc_feature (90)..(90): n is a, c, g, or t
  misc_feature (93)..(93): n is a, c, g, or t
  misc_feature (96)..(96): n is a, c, g, or t
  misc_feature (99)..(99): n is a, c, g, or t
  misc_feature (105)..(105): n is a, c, g, or t
  misc_feature (111)..(111): n is a, c, g, or t
  misc_feature (114)..(114): n is a, c, g, or t
  misc_feature (126)..(126): n is a, c, g, or t
  misc_feature (129)..(129): n is a, c, g, or t
  misc_feature (132)..(132): n is a, c, g, or t
  misc_feature (144)..(144): n is a, c, g, or t
  misc_feature (147)..(147): n is a, c, g, or t
  misc_feature (171)..(171): n is a, c, g, or t
  misc_feature (174)..(174): n is a, c, g, or t
  misc_feature (177)..(177): n is a, c, g, or t
  misc_feature (180)..(180): n is a, c, g, or t
  misc_feature (183)..(183): n is a, c, g, or t
  misc_feature (186)..(186): n is a, c, g, or t
  misc_feature (195)..(195): n is a, c, g, or t
  misc_feature (198)..(198): n is a, c, g, or t
  misc_feature (204)..(204): n is a, c, g, or t
  misc_feature (210)..(210): n is a, c, g, or t
  misc_feature (213)..(213): n is a, c, g, or t
  misc_feature (222)..(222): n is a, c, g, or t
  misc_feature (225)..(225): n is a, c, g, or t
  misc_feature (228)..(228): n is a, c, g, or t
  misc_feature (234)..(234): n is a, c, g, or t
  misc_feature (237)..(237): n is a, c, g, or t
  misc_feature (240)..(240): n is a, c, g, or t
  misc_feature (243)..(243): n is a, c, g, or t
  misc_feature (249)..(249): n is a, c, g, or t
  misc_feature (255)..(255): n is a, c, g, or t
  misc_feature (264)..(264): n is a, c, g, or t
  misc_feature (267)..(267): n is a, c, g, or t
  misc_feature (270)..(270): n is a, c, g, or t
  misc_feature (276)..(276): n is a, c, g, or t
  misc_feature (288)..(288): n is a, c, g, or t
  misc_feature (303)..(303): n is a, c, g, or t
  misc_feature (306)..(306): n is a, c, g, or t
  misc_feature (309)..(309): n is a, c, g, or t
  misc_feature (318)..(318): n is a, c, g, or t
  misc_feature (321)..(321): n is a, c, g, or t
  misc_feature (327)..(327): n is a, c, g, or t
  misc_feature (333)..(333): n is a, c, g, or t
  misc_feature (342)..(342): n is a, c, g, or t
  misc_feature (348)..(348): n is a, c, g, or t
  misc_feature (357)..(357): n is a, c, g, or t
  misc_feature (360)..(360): n is a, c, g, or t
  misc_feature (363)..(363): n is a, c, g, or t
  misc_feature (369)..(369): n is a, c, g, or t
  misc_feature (372)..(372): n is a, c, g, or t
  misc_feature (375)..(375): n is a, c, g, or t
  misc_feature (381)..(381): n is a, c, g, or t
  misc_feature (387)..(387): n is a, c, g, or t
  misc_feature (390)..(390): n is a, c, g, or t
  misc_feature (393)..(393): n is a, c, g, or t
  misc_feature (396)..(396): n is a, c, g, or t
  misc_feature (399)..(399): n is a, c, g, or t
  misc_feature (402)..(402): n is a, c, g, or t
  misc_feature (405)..(405): n is a, c, g, or t
  misc_feature (408)..(408): n is a, c, g, or t
  misc_feature (411)..(411): n is a, c, g, or t
  misc_feature (423)..(423): n is a, c, g, or t
  misc_feature (429)..(429): n is a, c, g, or t
  misc_feature (432)..(432): n is a, c, g, or t
  misc_feature (435)..(435): n is a, c, g, or t
  misc_feature (441)..(441): n is a, c, g, or t
  misc_feature (444)..(444): n is a, c, g, or t
  misc_feature (450)..(450): n is a, c, g, or t
  misc_feature (459)..(459): n is a, c, g, or t
  misc_feature (471)..(471): n is a, c, g, or t
  misc_feature (474)..(474): n is a, c, g, or t
  misc_feature (477)..(477): n is a, c, g, or t
  misc_feature (486)..(486): n is a, c, g, or t
  misc_feature (495)..(495): n is a, c, g, or t
  misc_feature (498)..(498): n is a, c, g, or t
  misc_feature (507)..(507): n is a, c, g, or t
  misc_feature (510)..(510): n is a, c, g, or t
  misc_feature (516)..(516): n is a, c, g, or t
  misc_feature (519)..(519): n is a, c, g, or t
  misc_feature (522)..(522): n is a, c, g, or t
  misc_feature (528)..(528): n is a, c, g, or t
  misc_feature (537)..(537): n is a, c, g, or t
  misc_feature (540)..(540): n is a, c, g, or t
  misc_feature (543)..(543): n is a, c, g, or t
  misc_feature (546)..(546): n is a, c, g, or t
  misc_feature (549)..(549): n is a, c, g, or t
  misc_feature (552)..(552): n is a, c, g, or t
  misc_feature (561)..(561): n is a, c, g, or t
  misc_feature (567)..(567): n is a, c, g, or t
  misc_feature (570)..(570): n is a, c, g, or t
  misc_feature (576)..(576): n is a, c, g, or t
  misc_feature (585)..(585): n is a, c, g, or t
  misc_feature (588)..(588): n is a, c, g, or t
  misc_feature (591)..(591): n is a, c, g, or t
  misc_feature (597)..(597): n is a, c, g, or t
  misc_feature (600)..(600): n is a, c, g, or t
  misc_feature (606)..(606): n is a, c, g, or t
  misc_feature (609)..(609): n is a, c, g, or t
  misc_feature (612)..(612): n is a, c, g, or t
  misc_feature (615)..(615): n is a, c, g, or t
  misc_feature (618)..(618): n is a, c, g, or t
  misc_feature (627)..(627): n is a, c, g, or t
  misc_feature (630)..(630): n is a, c, g, or t
  misc_feature (636)..(636): n is a, c, g, or t
  misc_feature (642)..(642): n is a, c, g, or t
  misc_feature (645)..(645): n is a, c, g, or t
  misc_feature (651)..(651): n is a, c, g, or t
  misc_feature (663)..(663): n is a, c, g, or t
  misc_feature (666)..(666): n is a, c, g, or t
  misc_feature (675)..(675): n is a, c, g, or t
  misc_feature (678)..(678): n is a, c, g, or t
  misc_feature (681)..(681): n is a, c, g, or t
  misc_feature (684)..(684): n is a, c, g, or t
  misc_feature (687)..(687): n is a, c, g, or t
  misc_feature (693)..(693): n is a, c, g, or t
  misc_feature (696)..(696): n is a, c, g, or t
  misc_feature (699)..(699): n is a, c, g, or t
  misc_feature (702)..(702): n is a, c, g, or t
  misc_feature (705)..(705): n is a, c, g, or t
  misc_feature (708)..(708): n is a, c, g, or t
  misc_feature (714)..(714): n is a, c, g, or t
  misc_feature (717)..(717): n is a, c, g, or t
  misc_feature (720)..(720): n is a, c, g, or t
  misc_feature (726)..(726): n is a, c, g, or t
  misc_feature (732)..(732): n is a, c, g, or t
  misc_feature (735)..(735): n is a, c, g, or t
  misc_feature (738)..(738): n is a, c, g, or t
  misc_feature (744)..(744): n is a, c, g, or t
  misc_feature (747)..(747): n is a, c, g, or t
  misc_feature (753)..(753): n is a, c, g, or t
  misc_feature (762)..(762): n is a, c, g, or t
  misc_feature (768)..(768): n is a, c, g, or t
  misc_feature (771)..(771): n is a, c, g, or t
  misc_feature (774)..(774): n is a, c, g, or t
  misc_feature (780)..(780): n is a, c, g, or t
  misc_feature (786)..(786): n is a, c, g, or t
  misc_feature (792)..(792): n is a, c, g, or t
  misc_feature (795)..(795): n is a, c, g, or t
  misc_feature (798)..(798): n is a, c, g, or t
  misc_feature (801)..(801): n is a, c, g, or t
  misc_feature (804)..(804): n is a, c, g, or t
  misc_feature (810)..(810): n is a, c, g, or t
  misc_feature (813)..(813): n is a, c, g, or t
  misc_feature (819)..(819): n is a, c, g, or t
  misc_feature (822)..(822): n is a, c, g, or t
  misc_feature (825)..(825): n is a, c, g, or t
  misc_feature (828)..(828): n is a, c, g, or t
  misc_feature (831)..(831): n is a, c, g, or t
  misc_feature (834)..(834): n is a, c, g, or t
  misc_feature (840)..(840): n is a, c, g, or t
  misc_feature (843)..(843): n is a, c, g, or t
  misc_feature (846)..(846): n is a, c, g, or t
  misc_feature (852)..(852): n is a, c, g, or t
  misc_feature (855)..(855): n is a, c, g, or t
  misc_feature (858)..(858): n is a, c, g, or t
  misc_feature (861)..(861): n is a, c, g, or t
  misc_feature (864)..(864): n is a, c, g, or t
  misc_feature (867)..(867): n is a, c, g, or t
  misc_feature (879)..(879): n is a, c, g, or t
  misc_feature (882)..(882): n is a, c, g, or t
  misc_feature (888)..(888): n is a, c, g, or t
  misc_feature (897)..(897): n is a, c, g, or t
  misc_feature (900)..(900): n is a, c, g, or t
  misc_feature (927)..(927): n is a, c, g, or t
  misc_feature (930)..(930): n is a, c, g, or t
  misc_feature (933)..(933): n is a, c, g, or t
  misc_feature (939)..(939): n is a, c, g, or t
  misc_feature (954)..(954): n is a, c, g, or t
  misc_feature (957)..(957): n is a, c, g, or t
  misc_feature (960)..(960): n is a, c, g, or t
  misc_feature (963)..(963): n is a, c, g, or t
  misc_feature (972)..(972): n is a, c, g, or t
  misc_feature (975)..(975): n is a, c, g, or t
  misc_feature (981)..(981): n is a, c, g, or t
  misc_feature (987)..(987): n is a, c, g, or t
  misc_feature (1020)..(1020): n is a, c, g, or t
  misc_feature (1026)..(1026): n is a, c, g, or t
  misc_feature (1029)..(1029): n is a, c, g, or t
  misc_feature (1032)..(1032): n is a, c, g, or t
  misc_feature (1038)..(1038): n is a, c, g, or t
  misc_feature (1041)..(1041): n is a, c, g, or t
  misc_feature (1050)..(1050): n is a, c, g, or t
  misc_feature (1053)..(1053): n is a, c, g, or t
  misc_feature (1068)..(1068): n is a, c, g, or t
  misc_feature (1071)..(1071): n is a, c, g, or t
  misc_feature (1080)..(1080): n is a, c, g, or t
  misc_feature (1095)..(1095): n is a, c, g, or t
  misc_feature (1098)..(1098): n is a, c, g, or t
  misc_feature (1104)..(1104): n is a, c, g, or t
  misc_feature (1107)..(1107): n is a, c, g, or t
  misc_feature (1110)..(1110): n is a, c, g, or t
  misc_feature (1113)..(1113): n is a, c, g, or t
  misc_feature (1116)..(1116): n is a, c, g, or t
  misc_feature (1119)..(1119): n is a, c, g, or t
  misc_feature (1122)..(1122): n is a, c, g, or t
  misc_feature (1125)..(1125): n is a, c, g, or t
  misc_feature (1131)..(1131): n is a, c, g, or t
  misc_feature (1137)..(1137): n is a, c, g, or t
  misc_feature (1140)..(1140): n is a, c, g, or t
  misc_feature (1143)..(1143): n is a, c, g, or t
  misc_feature (1146)..(1146): n is a, c, g, or t
  misc_feature (1164)..(1164): n is a, c, g, or t
  misc_feature (1167)..(1167): n is a, c, g, or t
  misc_feature (1170)..(1170): n is a, c, g, or t
  misc_feature (1173)..(1173): n is a, c, g, or t
  misc_feature (1176)..(1176): n is a, c, g, or t
  misc_feature (1179)..(1179): n is a, c, g, or t
  misc_feature (1182)..(1182): n is a, c, g, or t
  misc_feature (1188)..(1188): n is a, c, g, or t
  misc_feature (1197)..(1197): n is a, c, g, or t
  misc_feature (1206)..(1206): n is a, c, g, or t
  misc_feature (1209)..(1209): n is a, c, g, or t
  misc_feature (1212)..(1212): n is a, c, g, or t
  misc_feature (1218)..(1218): n is a, c, g, or t
  misc_feature (1224)..(1224): n is a, c, g, or t
  misc_feature (1239)..(1239): n is a, c, g, or t
  misc_feature (1242)..(1242): n is a, c, g, or t
  misc_feature (1245)..(1245): n is a, c, g, or t
  misc_feature (1251)..(1251): n is a, c, g, or t
  misc_feature (1254)..(1254): n is a, c, g, or t
  misc_feature (1263)..(1263): n is a, c, g, or t
  misc_feature (1275)..(1275): n is a, c, g, or t
  misc_feature (1278)..(1278): n is a, c, g, or t
  misc_feature (1284)..(1284): n is a, c, g, or t
  misc_feature (1287)..(1287): n is a, c, g, or t
  misc_feature (1293)..(1293): n is a, c, g, or t
  misc_feature (1311)..(1311): n is a, c, g, or t
  misc_feature (1314)..(1314): n is a, c, g, or t
  misc_feature (1320)..(1320): n is a, c, g, or t
  misc_feature (1323)..(1323): n is a, c, g, or t
  misc_feature (1326)..(1326): n is a, c, g, or t
  misc_feature (1329)..(1329): n is a, c, g, or t
  misc_feature (1332)..(1332): n is a, c, g, or t
  misc_feature (1335)..(1335): n is a, c, g, or t
  misc_feature (1338)..(1338): n is a, c, g, or t
  misc_feature (1341)..(1341): n is a, c, g, or t
  misc_feature (1344)..(1344): n is a, c, g, or t
  misc_feature (1347)..(1347): n is a, c, g, or t
  misc_feature (1353)..(1353): n is a, c, g, or t
  misc_feature (1356)..(1356): n is a, c, g, or t
  misc_feature (1359)..(1359): n is a, c, g, or t
  misc_feature (1362)..(1362): n is a, c, g, or t
  misc_feature (1365)..(1365): n is a, c, g, or t
  misc_feature (1368)..(1368): n is a, c, g, or t
  misc_feature (1374)..(1374): n is a, c, g, or t
  misc_feature (1377)..(1377): n is a, c, g, or t
  misc_feature (1383)..(1383): n is a, c, g, or t
  misc_feature (1386)..(1386): n is a, c, g, or t
  misc_feature (1389)..(1389): n is a, c, g, or t
  misc_feature (1392)..(1392): n is a, c, g, or t
  misc_feature (1395)..(1395): n is a, c, g, or t
  misc_feature (1401)..(1401): n is a, c, g, or t
  misc_feature (1404)..(1404): n is a, c, g, or t
  misc_feature (1407)..(1407): n is a, c, g, or t
  misc_feature (1416)..(1416): n is a, c, g, or t
  misc_feature (1419)..(1419): n is a, c, g, or t
  misc_feature (1425)..(1425): n is a, c, g, or t
  misc_feature (1428)..(1428): n is a, c, g, or t
  misc_feature (1434)..(1434): n is a, c, g, or t
  misc_feature (1440)..(1440): n is a, c, g, or t
  misc_feature (1443)..(1443): n is a, c, g, or t
  misc_feature (1446)..(1446): n is a, c, g, or t
  misc_feature (1449)..(1449): n is a, c, g, or t
  misc_feature (1455)..(1455): n is a, c, g, or t
  misc_feature (1458)..(1458): n is a, c, g, or t
  misc_feature (1461)..(1461): n is a, c, g, or t
  misc_feature (1467)..(1467): n is a, c, g, or t
  misc_feature (1470)..(1470): n is a, c, g, or t
  misc_feature (1479)..(1479): n is a, c, g, or t
  misc_feature (1482)..(1482): n is a, c, g, or t
  misc_feature (1485)..(1485): n is a, c, g, or t
  misc_feature (1488)..(1488): n is a, c, g, or t
  misc_feature (1491)..(1491): n is a, c, g, or t
  misc_feature (1494)..(1494): n is a, c, g, or t
  misc_feature (1500)..(1500): n is a, c, g, or t
  misc_feature (1503)..(1503): n is a, c, g, or t
  misc_feature (1506)..(1506): n is a, c, g, or t
  misc_feature (1509)..(1509): n is a, c, g, or t
  misc_feature (1512)..(1512): n is a, c, g, or t
  misc_feature (1515)..(1515): n is a, c, g, or t
  misc_feature (1518)..(1518): n is a, c, g, or t
  misc_feature (1521)..(1521): n is a, c, g, or t
  misc_feature (1524)..(1524): n is a, c, g, or t
  misc_feature (1527)..(1527): n is a, c, g, or t
  misc_feature (1530)..(1530): n is a, c, g, or t
  misc_feature (1533)..(1533): n is a, c, g, or t
  misc_feature (1536)..(1536): n is a, c, g, or t
  misc_feature (1539)..(1539): n is a, c, g, or t
  misc_feature (1548)..(1548): n is a, c, g, or t
  misc_feature (1554)..(1554): n is a, c, g, or t
  misc_feature (1560)..(1560): n is a, c, g, or t
  misc_feature (1584)..(1584): n is a, c, g, or t
  misc_feature (1587)..(1587): n is a, c, g, or t
  misc_feature (1590)..(1590): n is a, c, g, or t
  misc_feature (1596)..(1596): n is a, c, g, or t
  misc_feature (1605)..(1605): n is a, c, g, or t
  misc_feature (1608)..(1608): n is a, c, g, or t
  misc_feature (1617)..(1617): n is a, c, g, or t
  misc_feature (1620)..(1620): n is a, c, g, or t
  misc_feature (1629)..(1629): n is a, c, g, or t
  misc_feature (1635)..(1635): n is a, c, g, or t
  misc_feature (1641)..(1641): n is a, c, g, or t
  misc_feature (1650)..(1650): n is a, c, g, or t
  misc_feature (1653)..(1653): n is a, c, g, or t
  misc_feature (1662)..(1662): n is a, c, g, or t
  misc_feature (1665)..(1665): n is a, c, g, or t
  misc_feature (1668)..(1668): n is a, c, g, or t
  misc_feature (1671)..(1671): n is a, c, g, or t
  misc_feature (1674)..(1674): n is a, c, g, or t
  misc_feature (1677)..(1677): n is a, c, g, or t
  misc_feature (1680)..(1680): n is a, c, g, or t
  misc_feature (1686)..(1686): n is a, c, g, or t
  misc_feature (1689)..(1689): n is a, c, g, or t
  misc_feature (1692)..(1692): n is a, c, g, or t
  misc_feature (1695)..(1695): n is a, c, g, or t
  misc_feature (1701)..(1701): n is a, c, g, or t
  misc_feature (1710)..(1710): n is a, c, g, or t
  misc_feature (1713)..(1713): n is a, c, g, or t
  misc_feature (1716)..(1716): n is a, c, g, or t
  misc_feature (1719)..(1719): n is a, c, g, or t
  misc_feature (1722)..(1722): n is a, c, g, or t
  misc_feature (1725)..(1725): n is a, c, g, or t
  misc_feature (1728)..(1728): n is a, c, g, or t
  misc_feature (1731)..(1731): n is a, c, g, or t
  misc_feature (1740)..(1740): n is a, c, g, or t
  misc_feature (1743)..(1743): n is a, c, g, or t
  misc_feature (1752)..(1752): n is a, c, g, or t
  misc_feature (1761)..(1761): n is a, c, g, or t
  misc_feature (1773)..(1773): n is a, c, g, or t
  misc_feature (1776)..(1776): n is a, c, g, or t
  misc_feature (1785)..(1785): n is a, c, g, or t
  misc_feature (1794)..(1794): n is a, c, g, or t
  misc_feature (1806)..(1806): n is a, c, g, or t
  misc_feature (1809)..(1809): n is a, c, g, or t
  misc_feature (1818)..(1818): n is a, c, g, or t
  misc_feature (1821)..(1821): n is a, c, g, or t
  misc_feature (1824)..(1824): n is a, c, g, or t
  misc_feature (1833)..(1833): n is a, c, g, or t
  misc_feature (1842)..(1842): n is a, c, g, or t
  misc_feature (1854)..(1854): n is a, c, g, or t
  misc_feature (1857)..(1857): n is a, c, g, or t
  misc_feature (1866)..(1866): n is a, c, g, or t
  misc_feature (1875)..(1875): n is a, c, g, or t
  misc_feature (1887)..(1887): n is a, c, g, or t
  misc_feature (1890)..(1890): n is a, c, g, or t
  misc_feature (1899)..(1899): n is a, c, g, or t
  misc_feature (1902)..(1902): n is a, c, g, or t
  misc_feature (1905)..(1905): n is a, c, g, or t
  misc_feature (1911)..(1911): n is a, c, g, or t
  misc_feature (1914)..(1914): n is a, c, g, or t
  misc_feature (1917)..(1917): n is a, c, g, or t
  misc_feature (1923)..(1923): n is a, c, g, or t
  misc_feature (1926)..(1926): n is a, c, g, or t
  misc_feature (1929)..(1929): n is a, c, g, or t
  misc_feature (1938)..(1938): n is a, c, g, or t
  misc_feature (1941)..(1941): n is a, c, g, or t
  misc_feature (1944)..(1944): n is a, c, g, or t
  misc_feature (1947)..(1947): n is a, c, g, or t
  misc_feature (1953)..(1953): n is a, c, g, or t
  misc_feature (1956)..(1956): n is a, c, g, or t
  misc_feature (1965)..(1965): n is a, c, g, or t
  misc_feature (1977)..(1977): n is a, c, g, or t
  misc_feature (1980)..(1980): n is a, c, g, or t
  misc_feature (1989)..(1989): n is a, c, g, or t
  misc_feature (1992)..(1992): n is a, c, g, or t
  misc_feature (1995)..(1995): n is a, c, g, or t
  misc_feature (1998)..(1998): n is a, c, g, or t
  misc_feature (2004)..(2004): n is a, c, g, or t
  misc_feature (2010)..(2010): n is a, c, g, or t
  misc_feature (2013)..(2013): n is a, c, g, or t
  misc_feature (2016)..(2016): n is a, c, g, or t
  misc_feature (2019)..(2019): n is a, c, g, or t
  misc_feature (2025)..(2025): n is a, c, g, or t
  misc_feature (2034)..(2034): n is a, c, g, or t
  misc_feature (2037)..(2037): n is a, c, g, or t
  misc_feature (2043)..(2043): n is a, c, g, or t
  misc_feature (2046)..(2046): n is a, c, g, or t
  misc_feature (2049)..(2049): n is a, c, g, or t
  misc_feature (2055)..(2055): n is a, c, g, or t
  misc_feature (2061)..(2061): n is a, c, g, or t
  misc_feature (2064)..(2064): n is a, c, g, or t
  misc_feature (2067)..(2067): n is a, c, g, or t
  misc_feature (2070)..(2070): n is a, c, g, or t
  misc_feature (2073)..(2073): n is a, c, g, or t
  misc_feature (2076)..(2076): n is a, c, g, or t
  misc_feature (2079)..(2079): n is a, c, g, or t
  misc_feature (2082)..(2082): n is a, c, g, or t
  misc_feature (2085)..(2085): n is a, c, g, or t
  misc_feature (2088)..(2088): n is a, c, g, or t
  misc_feature (2091)..(2091): n is a, c, g, or t
  misc_feature (2094)..(2094): n is a, c, g, or t
  misc_feature (2097)..(2097): n is a, c, g, or t
  misc_feature (2112)..(2112): n is a, c, g, or t
  misc_feature (2118)..(2118): n is a, c, g, or t
  misc_feature (2121)..(2121): n is a, c, g, or t
  misc_feature (2124)..(2124): n is a, c, g, or t
  misc_feature (2130)..(2130): n is a, c, g, or t
  misc_feature (2133)..(2133): n is a, c, g, or t
atgccnwsntgggcnytnttyatggtnacnwsntgyytnytnytngcnccncaraayytngcncargtnwsnwsncargaygtnwsnytnytngcnwsngaywsngarccnytnaartgyttywsnmgnacnttygargayytnacntgyttytgggaygargargargcngcnccnwsnggnacntaycarytnytntaygcntayccnmgngaraarccnmgngcntgyccnytnwsnwsncarwsnatgccncayttyggnacnmgntaygtntgycarttyccngaycargargargtnmgnytnttyttyccnytncayytntgggtnaaraaygtnttyytnaaycaracnmgnacncarmgngtnytnttygtngaywsngtnggnytnccngcnccnccnwsnathathaargcnatgggnggnwsncarccnggngarytncarathwsntgggargarccngcnccngarathwsngayttyytnmgntaygarytnmgntayggnccnmgngayccnaaraaywsnacnggnccnacngtnathcarytnathgcnacngaracntgytgyccngcnytncarmgnccncaywsngcnwsngcnytngaycarwsnccntgygcncarccnacnatgccntggcargayggnccnaarcaracnwsnccnwsnmgngargcnwsngcnytnacngcngarggnggnwsntgyytnathwsnggnytncarccnggnaaywsntaytggytncarytnmgnwsngarccngayggnathwsnytnggnggnwsntggggnwsntggwsnytnccngtnacngtngayytnccnggngaygcngtngcnytnggnytncartgyttyacnytngayytnaaraaygtnacntgycartggcarcarcargaycaygcnwsnwsncarggnttyttytaycaywsnmgngcnmgntgytgyccnmgngaymgntayccnathtgggaraaytgygargargargaraaracnaayccnggnytncaracnccncarttywsnmgntgycayttyaarwsnmgnaaygaywsnathathcayathytngtngargtnacnacngcnccnggnacngtncaywsntayytnggnwsnccnttytggathcaycargcngtnmgnytnccnacnccnaayytncaytggmgngarathwsnwsnggncayytngarytngartggcarcayccnwsnwsntgggcngcncargaracntgytaycarytnmgntayacnggngarggncaycargaytggaargtnytngarccnccnytnggngcnmgnggnggnacnytngarytnmgnccnmgnwsnmgntaymgnytncarytnmgngcnmgnytnaayggnccnacntaycarggnccntggwsnwsntggwsngayccnacnmgngtngaracngcnacngaracngcntggathwsnytngtnacngcnytncayytngtnytnggnytnwsngcngtnytnggnytnytnytnytntaycayggncarmgncaywsngaygarcaycaycaygaygaywsnytnccncayccncarcargcnacngaygaywsnggncaygarwsngaywsnaaywsnaaygarggnmgncaycayytnytngtnwsnggngcnggngayggnccnccnytntgywsncaraayytnggngcnccnggnggnggnccngayaayggnccncargayccngayaayacngaygayaayggnccncargayccngayaayacngaygayaayggnccncaygayccnytnccncargayccngayaayacngaygayaayggnccncargayccngayaayacngaygayaayggnccncaygayccnytnccncaywsnccnwsngaywsngcnggnaaygayggnggnccnccncarytnacngargargtngaraayaarggnggngaycarggnccnccnytnatgacngayggnggnggnggncaywsncaygaywsnggncayggnggnggngayccncayytnccnacnytnytnytnggnwsnwsnggnwsnggnggngaygaygaygayccncayggnccngtncarytnwsntaytaygaytrrtrr

SEQ ID NO: 27 - DNA, 1671 bp, Artificial Sequence
  TpoRec.TpoRtm.CD137cyto
  misc_feature (6)..(6): n is a, c, g, or t
  misc_feature (9)..(9): n is a, c, g, or t
  misc_feature (15)..(15): n is a, c, g, or t
  misc_feature (18)..(18): n is a, c, g, or t
  misc_feature (27)..(27): n is a, c, g, or t
  misc_feature (30)..(30): n is a, c, g, or t
  misc_feature (33)..(33): n is a, c, g, or t
  misc_feature (39)..(39): n is a, c, g, or t
  misc_feature (42)..(42): n is a, c, g, or t
  misc_feature (45)..(45): n is a, c, g, or t
  misc_feature (48)..(48): n is a, c, g, or t
  misc_feature (51)..(51): n is a, c, g, or t
  misc_feature (60)..(60): n is a, c, g, or t
  misc_feature (63)..(63): n is a, c, g, or t
  misc_feature (69)..(69): n is a, c, g, or t
  misc_feature (72)..(72): n is a, c, g, or t
  misc_feature (75)..(75): n is a, c, g, or t
  misc_feature (84)..(84): n is a, c, g, or t
  misc_feature (87)..(87): n is a, c, g, or t
  misc_feature (90)..(90): n is a, c, g, or t
  misc_feature (93)..(93): n is a, c, g, or t
  misc_feature (96)..(96): n is a, c, g, or t
  misc_feature (99)..(99): n is a, c, g, or t
  misc_feature (105)..(105): n is a, c, g, or t
  misc_feature (111)..(111): n is a, c, g, or t
  misc_feature (114)..(114): n is a, c, g, or t
  misc_feature (126)..(126): n is a, c, g, or t
  misc_feature (129)..(129): n is a, c, g, or t
  misc_feature (132)..(132): n is a, c, g, or t
  misc_feature (144)..(144): n is a, c, g, or t
  misc_feature (147)..(147): n is a, c, g, or t
  misc_feature (171)..(171): n is a, c, g, or t
  misc_feature (174)..(174): n is a, c, g, or t
  misc_feature (177)..(177): n is a, c, g, or t
  misc_feature (180)..(180): n is a, c, g, or t
  misc_feature (183)..(183): n is a, c, g, or t
  misc_feature (186)..(186): n is a, c, g, or t
  misc_feature (195)..(195): n is a, c, g, or t
  misc_feature (198)..(198): n is a, c, g, or t
  misc_feature (204)..(204): n is a, c, g, or t
  misc_feature (210)..(210): n is a, c, g, or t
  misc_feature (213)..(213): n is a, c, g, or t
  misc_feature (222)..(222): n is a, c, g, or t
  misc_feature (225)..(225): n is a, c, g, or t
  misc_feature (228)..(228): n is a, c, g, or t
  misc_feature (234)..(234): n is a, c, g, or t
  misc_feature (237)..(237): n is a, c, g, or t
  misc_feature (240)..(240): n is a, c, g, or t
  misc_feature (243)..(243): n is a, c, g, or t
  misc_feature (249)..(249): n is a, c, g, or t
  misc_feature (255)..(255): n is a, c, g, or t
  misc_feature (264)..(264): n is a, c, g, or t
  misc_feature (267)..(267): n is a, c, g, or t
  misc_feature (270)..(270): n is a, c, g, or t
  misc_feature (276)..(276): n is a, c, g, or t
  misc_feature (288)..(288): n is a, c, g, or t
  misc_feature (303)..(303): n is a, c, g, or t
  misc_feature (306)..(306): n is a, c, g, or t
  misc_feature (309)..(309): n is a, c, g, or t
  misc_feature (318)..(318): n is a, c, g, or t
  misc_feature (321)..(321): n is a, c, g, or t
  misc_feature (327)..(327): n is a, c, g, or t
  misc_feature (333)..(333): n is a, c, g, or t
  misc_feature (342)..(342): n is a, c, g, or t
  misc_feature (348)..(348): n is a, c, g, or t
  misc_feature (357)..(357): n is a, c, g, or t
  misc_feature (360)..(360): n is a, c, g, or t
  misc_feature (363)..(363): n is a, c, g, or t
  misc_feature (369)..(369): n is a, c, g, or t
  misc_feature (372)..(372): n is a, c, g, or t
  misc_feature (375)..(375): n is a, c, g, or t
  misc_feature (381)..(381): n is a, c, g, or t
  misc_feature (387)..(387): n is a, c, g, or t
  misc_feature (390)..(390): n is a, c, g, or t
  misc_feature (393)..(393): n is a, c, g, or t
  misc_feature (396)..(396): n is a, c, g, or t
  misc_feature (399)..(399): n is a, c, g, or t
  misc_feature (402)..(402): n is a, c, g, or t
  misc_feature (405)..(405): n is a, c, g, or t
  misc_feature (408)..(408): n is a, c, g, or t
  misc_feature (411)..(411): n is a, c, g, or t
  misc_feature (423)..(423): n is a, c, g, or t
  misc_feature (429)..(429): n is a, c, g, or t
  misc_feature (432)..(432): n is a, c, g, or t
  misc_feature (435)..(435): n is a, c, g, or t
  misc_feature (441)..(441): n is a, c, g, or t
  misc_feature (444)..(444): n is a, c, g, or t
  misc_feature (450)..(450): n is a, c, g, or t
  misc_feature (459)..(459): n is a, c, g, or t
  misc_feature (471)..(471): n is a, c, g, or t
  misc_feature (474)..(474): n is a, c, g, or t
  misc_feature (477)..(477): n is a, c, g, or t
  misc_feature (486)..(486): n is a, c, g, or t
  misc_feature (495)..(495): n is a, c, g, or t
  misc_feature (498)..(498): n is a, c, g, or t
  misc_feature (507)..(507): n is a, c, g, or t
  misc_feature (510)..(510): n is a, c, g, or t
  misc_feature (516)..(516): n is a, c, g, or t
  misc_feature (519)..(519): n is a, c, g, or t
  misc_feature (522)..(522): n is a, c, g, or t
  misc_feature (528)..(528): n is a, c, g, or t
  misc_feature (537)..(537): n is a, c, g, or t
  misc_feature (540)..(540): n is a, c, g, or t
  misc_feature (543)..(543): n is a, c, g, or t
  misc_feature (546)..(546): n is a, c, g, or t
  misc_feature (549)..(549): n is a, c, g, or t
  misc_feature (552)..(552): n is a, c, g, or t
  misc_feature (561)..(561): n is a, c, g, or t
  misc_feature (567)..(567): n is a, c, g, or t
  misc_feature (570)..(570): n is a, c, g, or t
  misc_feature (576)..(576): n is a, c, g, or t
  misc_feature (585)..(585): n is a, c, g, or t
  misc_feature (588)..(588): n is a, c, g, or t
  misc_feature (591)..(591): n is a, c, g, or t
  misc_feature (597)..(597): n is a, c, g, or t
  misc_feature (600)..(600): n is a, c, g, or t
  misc_feature (606)..(606): n is a, c, g, or t
  misc_feature (609)..(609): n is a, c, g, or t
  misc_feature (612)..(612): n is a, c, g, or t
  misc_feature (615)..(615): n is a, c, g, or t
  misc_feature (618)..(618): n is a, c, g, or t
  misc_feature (627)..(627): n is a, c, g, or t
  misc_feature (630)..(630): n is a, c, g, or t
  misc_feature (636)..(636): n is a, c, g, or t
  misc_feature (642)..(642): n is a, c, g, or t
  misc_feature (645)..(645): n is a, c, g, or t
  misc_feature (651)..(651): n is a, c, g, or t
  misc_feature (663)..(663): n is a, c, g, or t
  misc_feature (666)..(666): n is a, c, g, or t
  misc_feature (675)..(675): n is a, c, g, or t
  misc_feature (678)..(678): n is a, c, g, or t
  misc_feature (681)..(681): n is a, c, g, or t
  misc_feature (684)..(684): n is a, c, g, or t
  misc_feature (687)..(687): n is a, c, g, or t
  misc_feature (693)..(693): n is a, c, g, or t
  misc_feature (696)..(696): n is a, c, g, or t
  misc_feature (699)..(699): n is a, c, g, or t
  misc_feature (702)..(702): n is a, c, g, or t
  misc_feature (705)..(705): n is a, c, g, or t
  misc_feature (708)..(708): n is a, c, g, or t
  misc_feature (714)..(714): n is a, c, g, or t
  misc_feature (717)..(717): n is a, c, g, or t
  misc_feature (720)..(720): n is a, c, g, or t
  misc_feature (726)..(726): n is a, c, g, or t
  misc_feature (732)..(732): n is a, c, g, or t
  misc_feature (735)..(735): n is a, c, g, or t
  misc_feature (738)..(738): n is a, c, g, or t
  misc_feature (744)..(744): n is a, c, g, or t
  misc_feature (747)..(747): n is a, c, g, or t
  misc_feature (753)..(753): n is a, c, g, or t
  misc_feature (762)..(762): n is a, c, g, or t
  misc_feature (768)..(768): n is a, c, g, or t
  misc_feature (771)..(771): n is a, c, g, or t
  misc_feature (774)..(774): n is a, c, g, or t
  misc_feature (780)..(780): n is a, c, g, or t
  misc_feature (786)..(786): n is a, c, g, or t
  misc_feature (792)..(792): n is a, c, g, or t
  misc_feature (795)..(795): n is a, c, g, or t
  misc_feature (798)..(798): n is a, c, g, or t
  misc_feature (801)..(801): n is a, c, g, or t
  misc_feature (804)..(804): n is a, c, g, or t
  misc_feature (810)..(810): n is a, c, g, or t
  misc_feature (813)..(813): n is a, c, g, or t
  misc_feature (819)..(819): n is a, c, g, or t
  misc_feature (822)..(822): n is a, c, g, or t
  misc_feature (825)..(825): n is a, c, g, or t
  misc_feature (828)..(828): n is a, c, g, or t
  misc_feature (831)..(831): n is a, c, g, or t
  misc_feature (834)..(834): n is a, c, g, or t
  misc_feature (840)..(840): n is a, c, g, or t
  misc_feature (843)..(843): n is a, c, g, or t
  misc_feature (846)..(846): n is a, c, g, or t
  misc_feature (852)..(852): n is a, c, g, or t
  misc_feature (855)..(855): n is a, c, g, or t
  misc_feature (858)..(858): n is a, c, g, or t
  misc_feature (861)..(861): n is a, c, g, or t
  misc_feature (864)..(864): n is a, c, g, or t
  misc_feature (867)..(867): n is a, c, g, or t
  misc_feature (879)..(879): n is a, c, g, or t
  misc_feature (882)..(882): n is a, c, g, or t
  misc_feature (888)..(888): n is a, c, g, or t
  misc_feature (897)..(897): n is a, c, g, or t
  misc_feature (900)..(900): n is a, c, g, or t
  misc_feature (927)..(927): n is a, c, g, or t
  misc_feature (930)..(930): n is a, c, g, or t
  misc_feature (933)..(933): n is a, c, g, or t
  misc_feature (939)..(939): n is a, c, g, or t
  misc_feature (954)..(954): n is a, c, g, or t
  misc_feature (957)..(957): n is a, c, g, or t
  misc_feature (960)..(960): n is a, c, g, or t
  misc_feature (963)..(963): n is a, c, g, or t
  misc_feature (972)..(972): n is a, c, g, or t
  misc_feature (975)..(975): n is a, c, g, or t
  misc_feature (981)..(981): n is a, c, g, or t
  misc_feature (987)..(987): n is a, c, g, or t
  misc_feature (1020)..(1020): n is a, c, g, or t
  misc_feature (1026)..(1026): n is a, c, g, or t
  misc_feature (1029)..(1029): n is a, c, g, or t
  misc_feature (1032)..(1032): n is a, c, g, or t
  misc_feature (1038)..(1038): n is a, c, g, or t
  misc_feature (1041)..(1041): n is a, c, g, or t
  misc_feature (1050)..(1050): n is a, c, g, or t
  misc_feature (1053)..(1053): n is a, c, g, or t
  misc_feature (1068)..(1068): n is a, c, g, or t
  misc_feature (1071)..(1071): n is a, c, g, or t
  misc_feature (1080)..(1080): n is a, c, g, or t
  misc_feature (1095)..(1095): n is a, c, g, or t
  misc_feature (1098)..(1098): n is a, c, g, or t
  misc_feature (1104)..(1104): n is a, c, g, or t
  misc_feature (1107)..(1107): n is a, c, g, or t
  misc_feature (1110)..(1110): n is a, c, g, or t
  misc_feature (1113)..(1113): n is a, c, g, or t
  misc_feature (1116)..(1116): n is a, c, g, or t
  misc_feature (1119)..(1119): n is a, c, g, or t
  misc_feature (1122)..(1122): n is a, c, g, or t
  misc_feature (1125)..(1125): n is a, c, g, or t
  misc_feature (1131)..(1131): n is a, c, g, or t
  misc_feature (1137)..(1137): n is a, c, g, or t
  misc_feature (1140)..(1140): n is a, c, g, or t
  misc_feature (1143)..(1143): n is a, c, g, or t
  misc_feature (1146)..(1146): n is a, c, g, or t
  misc_feature (1164)..(1164): n is a, c, g, or t
  misc_feature (1167)..(1167): n is a, c, g, or t
  misc_feature (1170)..(1170): n is a, c, g, or t
  misc_feature (1173)..(1173): n is a, c, g, or t
  misc_feature (1176)..(1176): n is a, c, g, or t
  misc_feature (1179)..(1179): n is a, c, g, or t
  misc_feature (1182)..(1182): n is a, c, g, or t
  misc_feature (1188)..(1188): n is a, c, g, or t
  misc_feature (1197)..(1197): n is a, c, g, or t
  misc_feature (1206)..(1206): n is a, c, g, or t
  misc_feature (1209)..(1209): n is a, c, g, or t
  misc_feature (1212)..(1212): n is a, c, g, or t
  misc_feature (1218)..(1218): n is a, c, g, or t
  misc_feature (1224)..(1224): n is a, c, g, or t
  misc_feature (1239)..(1239): n is a, c, g, or t
  misc_feature (1242)..(1242): n is a, c, g, or t
  misc_feature (1245)..(1245): n is a, c, g, or t
  misc_feature (1251)..(1251): n is a, c, g, or t
  misc_feature (1254)..(1254): n is a, c, g, or t
  misc_feature (1263)..(1263): n is a, c, g, or t
  misc_feature (1275)..(1275): n is a, c, g, or t
  misc_feature (1278)..(1278): n is a, c, g, or t
  misc_feature (1284)..(1284): n is a, c, g, or t
  misc_feature (1287)..(1287): n is a, c, g, or t
  misc_feature (1293)..(1293): n is a, c, g, or t
  misc_feature (1311)..(1311): n is a, c, g, or t
  misc_feature (1314)..(1314): n is a, c, g, or t
  misc_feature (1320)..(1320): n is a, c, g, or t
  misc_feature (1323)..(1323): n is a, c, g, or t
  misc_feature (1326)..(1326): n is a, c, g, or t
  misc_feature (1329)..(1329): n is a, c, g, or t
  misc_feature (1332)..(1332): n is a, c, g, or t
  misc_feature (1335)..(1335): n is a, c, g, or t
  misc_feature (1338)..(1338): n is a, c, g, or t
  misc_feature (1341)..(1341): n is a, c, g, or t
  misc_feature (1344)..(1344): n is a, c, g, or t
  misc_feature (1347)..(1347): n is a, c, g, or t
  misc_feature (1353)..(1353): n is a, c, g, or t
  misc_feature (1356)..(1356): n is a, c, g, or t
  misc_feature (1359)..(1359): n is a, c, g, or t
  misc_feature (1362)..(1362): n is a, c, g, or t
  misc_feature (1365)..(1365): n is a, c, g, or t
  misc_feature (1368)..(1368): n is a, c, g, or t
  misc_feature (1374)..(1374): n is a, c, g, or t
  misc_feature (1377)..(1377): n is a, c, g, or t
  misc_feature (1383)..(1383): n is a, c, g, or t
  misc_feature (1386)..(1386): n is a, c, g, or t
  misc_feature (1389)..(1389): n is a, c, g, or t
  misc_feature (1392)..(1392): n is a, c, g, or t
  misc_feature (1395)..(1395): n is a, c, g, or t
  misc_feature (1401)..(1401): n is a, c, g, or t
  misc_feature (1404)..(1404): n is a, c, g, or t
  misc_feature (1407)..(1407): n is a, c, g, or t
  misc_feature (1416)..(1416): n is a, c, g, or t
  misc_feature (1419)..(1419): n is a, c, g, or t
  misc_feature (1425)..(1425): n is a, c, g, or t
  misc_feature (1428)..(1428): n is a, c, g, or t
  misc_feature (1434)..(1434): n is a, c, g, or t
  misc_feature (1440)..(1440): n is a, c, g, or t
  misc_feature (1443)..(1443): n is a, c, g, or t
  misc_feature (1446)..(1446): n is a, c, g, or t
  misc_feature (1449)..(1449): n is a, c, g, or t
  misc_feature (1455)..(1455): n is a, c, g, or t
  misc_feature (1458)..(1458): n is a, c, g, or t
  misc_feature (1461)..(1461): n is a, c, g, or t
  misc_feature (1467)..(1467): n is a, c, g, or t
  misc_feature (1470)..(1470): n is a, c, g, or t
  misc_feature (1479)..(1479): n is a, c, g, or t
  misc_feature (1482)..(1482): n is a, c, g, or t
  misc_feature (1485)..(1485): n is a, c, g, or t
  misc_feature (1488)..(1488): n is a, c, g, or t
  misc_feature (1491)..(1491): n is a, c, g, or t
  misc_feature (1494)..(1494): n is a, c, g, or t
  misc_feature (1500)..(1500): n is a, c, g, or t
  misc_feature (1503)..(1503): n is a, c, g, or t
  misc_feature (1506)..(1506): n is a, c, g, or t
  misc_feature (1509)..(1509): n is a, c, g, or t
  misc_feature (1512)..(1512): n is a, c, g, or t
  misc_feature (1515)..(1515): n is a, c, g, or t
  misc_feature (1518)..(1518): n is a, c, g, or t
  misc_feature (1521)..(1521): n is a, c, g, or t
  misc_feature (1524)..(1524): n is a, c, g, or t
  misc_feature (1527)..(1527): n is a, c, g, or t
  misc_feature (1530)..(1530): n is a, c, g, or t
  misc_feature (1533)..(1533): n is a, c, g, or t
  misc_feature (1536)..(1536): n is a, c, g, or t
  misc_feature (1539)..(1539): n is a, c, g, or t
  misc_feature (1545)..(1545): n is a, c, g, or t
  misc_feature (1548)..(1548): n is a, c, g, or t
  misc_feature (1551)..(1551): n is a, c, g, or t
  misc_feature (1560)..(1560): n is a, c, g, or t
  misc_feature (1563)..(1563): n is a, c, g, or t
  misc_feature (1581)..(1581): n is a, c, g, or t
  misc_feature (1590)..(1590): n is a, c, g, or t
  misc_feature (1593)..(1593): n is a, c, g, or t
  misc_feature (1596)..(1596): n is a, c, g, or t
  misc_feature (1602)..(1602): n is a, c, g, or t
  misc_feature (1605)..(1605): n is a, c, g, or t
  misc_feature (1620)..(1620): n is a, c, g, or t
  misc_feature (1626)..(1626): n is a, c, g, or t
  misc_feature (1632)..(1632): n is a, c, g, or t
  misc_feature (1638)..(1638): n is a, c, g, or t
  misc_feature (1653)..(1653): n is a, c, g, or t
  misc_feature (1656)..(1656): n is a, c, g, or t
  misc_feature (1665)..(1665): n is a, c, g, or t
atgccnwsntgggcnytnttyatggtnacnwsntgyytnytnytngcnccncaraayytngcncargtnwsnwsncargaygtnwsnytnytngcnwsngaywsngarccnytnaartgyttywsnmgnacnttygargayytnacntgyttytgggaygargargargcngcnccnwsnggnacntaycarytnytntaygcntayccnmgngaraarccnmgngcntgyccnytnwsnwsncarwsnatgccncayttyggnacnmgntaygtntgycarttyccngaycargargargtnmgnytnttyttyccnytncayytntgggtnaaraaygtnttyytnaaycaracnmgnacncarmgngtnytnttygtngaywsngtnggnytnccngcnccnccnwsnathathaargcnatgggnggnwsncarccnggngarytncarathwsntgggargarccngcnccngarathwsngayttyytnmgntaygarytnmgntayggnccnmgngayccnaaraaywsnacnggnccnacngtnathcarytnathgcnacngaracntgytgyccngcnytncarmgnccncaywsngcnwsngcnytngaycarwsnccntgygcncarccnacnatgccntggcargayggnccnaarcaracnwsnccnwsnmgngargcnwsngcnytnacngcngarggnggnwsntgyytnathwsnggnytncarccnggnaaywsntaytggytncarytnmgnwsngarccngayggnathwsnytnggnggnwsntggggnwsntggwsnytnccngtnacngtngayytnccnggngaygcngtngcnytnggnytncartgyttyacnytngayytnaaraaygtnacntgycartggcarcarcargaycaygcnwsnwsncarggnttyttytaycaywsnmgngcnmgntgytgyccnmgngaymgntayccnathtgggaraaytgygargargargaraaracnaayccnggnytncaracnccncarttywsnmgntgycayttyaarwsnmgnaaygaywsnathathcayathytngtngargtnacnacngcnccnggnacngtncaywsntayytnggnwsnccnttytggathcaycargcngtnmgnytnccnacnccnaayytncaytggmgngarathwsnwsnggncayytngarytngartggcarcayccnwsnwsntgggcngcncargaracntgytaycarytnmgntayacnggngarggncaycargaytggaargtnytngarccnccnytnggngcnmgnggnggnacnytngarytnmgnccnmgnwsnmgntaymgnytncarytnmgngcnmgnytnaayggnccnacntaycarggnccntggwsnwsntggwsngayccnacnmgngtngaracngcnacngaracngcntggathwsnytngtnacngcnytncayytngtnytnggnytnwsngcngtnytnggnytnytnytnytnaarmgnggnmgnaaraarytnytntayathttyaarcarccnttyatgmgnccngtncaracnacncargargargayggntgywsntgymgnttyccngargargargarggnggntgygarytntrrtrr

SEQ ID NO: 28 - DNA, 1668 bp, Artificial Sequence
  TpoRec.TpoRtm.CD28cyto
  misc_feature (6)..(6): n is a, c, g, or t
  misc_feature (9)..(9): n is a, c, g, or t
  misc_feature (15)..(15): n is a, c, g, or t
  misc_feature (18)..(18): n is a, c, g, or t
  misc_feature (27)..(27): n is a, c, g, or t
  misc_feature (30)..(30): n is a, c, g, or t
  misc_feature (33)..(33): n is a, c, g, or t
  misc_feature (39)..(39): n is a, c, g, or t
  misc_feature (42)..(42): n is a, c, g, or t
  misc_feature (45)..(45): n is a, c, g, or t
  misc_feature (48)..(48): n is a, c, g, or t
  misc_feature (51)..(51): n is a, c, g, or t
  misc_feature (60)..(60): n is a, c, g, or t
  misc_feature (63)..(63): n is a, c, g, or t
  misc_feature (69)..(69): n is a, c, g, or t
  misc_feature (72)..(72): n is a, c, g, or t
  misc_feature (75)..(75): n is a, c, g, or t
  misc_feature (84)..(84): n is a, c, g, or t
  misc_feature (87)..(87): n is a, c, g, or t
  misc_feature (90)..(90): n is a, c, g, or t
  misc_feature (93)..(93): n is a, c, g, or t
  misc_feature (96)..(96): n is a, c, g, or t
  misc_feature (99)..(99): n is a, c, g, or t
  misc_feature (105)..(105): n is a, c, g, or t
  misc_feature (111)..(111): n is a, c, g, or t
  misc_feature (114)..(114): n is a, c, g, or t
  misc_feature (126)..(126): n is a, c, g, or t
  misc_feature (129)..(129): n is a, c, g, or t
  misc_feature (132)..(132): n is a, c, g, or t
  misc_feature (144)..(144): n is a, c, g, or t
  misc_feature (147)..(147): n is a, c, g, or t
  misc_feature (171)..(171): n is a, c, g, or t
  misc_feature (174)..(174): n is a, c, g, or t
  misc_feature (177)..(177): n is a, c, g, or t
  misc_feature (180)..(180): n is a, c, g, or t
  misc_feature (183)..(183): n is a, c, g, or t
  misc_feature (186)..(186): n is a, c, g, or t
  misc_feature (195)..(195): n is a, c, g, or t
  misc_feature (198)..(198): n is a, c, g, or t
  misc_feature (204)..(204): n is a, c, g, or t
  misc_feature (210)..(210): n is a, c, g, or t
  misc_feature (213)..(213): n is a, c, g, or t
  misc_feature (222)..(222): n is a, c, g, or t
  misc_feature (225)..(225): n is a, c, g, or t
  misc_feature (228)..(228): n is a, c, g, or t
  misc_feature (234)..(234): n is a, c, g, or t
  misc_feature (237)..(237): n is a, c, g, or t
  misc_feature (240)..(240): n is a, c, g, or t
  misc_feature (243)..(243): n is a, c, g, or t
  misc_feature (249)..(249): n is a, c, g, or t
  misc_feature (255)..(255): n is a, c, g, or t
  misc_feature (264)..(264): n is a, c, g, or t
  misc_feature (267)..(267): n is a, c, g, or t
  misc_feature (270)..(270): n is a, c, g, or t
  misc_feature (276)..(276): n is a, c, g, or t
  misc_feature (288)..(288): n is a, c, g, or t
  misc_feature (303)..(303): n is a, c, g, or t
  misc_feature (306)..(306): n is a, c, g, or t
  misc_feature (309)..(309): n is a, c, g, or t
  misc_feature (318)..(318): n is a, c, g, or t
  misc_feature (321)..(321): n is a, c, g, or t
  misc_feature (327)..(327): n is a, c, g, or t
  misc_feature (333)..(333): n is a, c, g, or t
  misc_feature (342)..(342): n is a, c, g, or t
  misc_feature (348)..(348): n is a, c, g, or t
  misc_feature (357)..(357): n is a, c, g, or t
  misc_feature (360)..(360): n is a, c, g, or t
  misc_feature (363)..(363): n is a, c, g, or t
  misc_feature (369)..(369): n is a, c, g, or t
  misc_feature (372)..(372): n is a, c, g, or t
  misc_feature (375)..(375): n is a, c, g, or t
  misc_feature (381)..(381): n is a, c, g, or t
  misc_feature (387)..(387): n is a, c, g, or t
  misc_feature (390)..(390): n is a, c, g, or t
  misc_feature (393)..(393): n is a, c, g, or t
  misc_feature (396)..(396): n is a, c, g, or t
  misc_feature (399)..(399): n is a, c, g, or t
  misc_feature (402)..(402): n is a, c, g, or t
  misc_feature (405)..(405): n is a, c, g, or t
  misc_feature (408)..(408): n is a, c, g, or t
  misc_feature (411)..(411): n is a, c, g, or t
  misc_feature (423)..(423): n is a, c, g, or t
  misc_feature (429)..(429): n is a, c, g, or t
  misc_feature (432)..(432): n is a, c, g, or t
  misc_feature (435)..(435): n is a, c, g, or t
  misc_feature (441)..(441): n is a, c, g, or t
  misc_feature (444)..(444): n is a, c, g, or t
  misc_feature (450)..(450): n is a, c, g, or t
  misc_feature (459)..(459): n is a, c, g, or t
  misc_feature (471)..(471): n is a, c, g, or t
  misc_feature (474)..(474): n is a, c, g, or t
  misc_feature (477)..(477): n is a, c, g, or t
  misc_feature (486)..(486): n is a, c, g, or t
  misc_feature (495)..(495): n is a, c, g, or t
  misc_feature (498)..(498): n is a, c, g, or t
  misc_feature (507)..(507): n is a, c, g, or t
  misc_feature (510)..(510): n is a, c, g, or t
  misc_feature (516)..(516): n is a, c, g, or t
  misc_feature (519)..(519): n is a, c, g, or t
  misc_feature (522)..(522): n is a, c, g, or t
  misc_feature (528)..(528): n is a, c, g, or t
  misc_feature (537)..(537): n is a, c, g, or t
  misc_feature (540)..(540): n is a, c, g, or t
  misc_feature (543)..(543): n is a, c, g, or t
  misc_feature (546)..(546): n is a, c, g, or t
  misc_feature (549)..(549): n is a, c, g, or t
  misc_feature (552)..(552): n is a, c, g, or t
  misc_feature (561)..(561): n is a, c, g, or t
  misc_feature (567)..(567): n is a, c, g, or t
  misc_feature (570)..(570): n is a, c, g, or t
  misc_feature (576)..(576): n is a, c, g, or t
  misc_feature (585)..(585): n is a, c, g, or t
  misc_feature (588)..(588): n is a, c, g, or t
  misc_feature (591)..(591): n is a, c, g, or t
  misc_feature (597)..(597): n is a, c, g, or t
  misc_feature (600)..(600): n is a, c, g, or t
  misc_feature (606)..(606): n is a, c, g, or t
  misc_feature (609)..(609): n is a, c, g, or t
  misc_feature (612)..(612): n is a, c, g, or t
  misc_feature (615)..(615): n is a, c, g, or t
  misc_feature (618)..(618): n is a, c, g, or t
  misc_feature (627)..(627): n is a, c, g, or t
  misc_feature (630)..(630): n is a, c, g, or t
  misc_feature (636)..(636): n is a, c, g, or t
  misc_feature (642)..(642): n is a, c, g, or t
  misc_feature (645)..(645): n is a, c, g, or t
  misc_feature (651)..(651): n is a, c, g, or t
  misc_feature (663)..(663): n is a, c, g, or t
  misc_feature (666)..(666): n is a, c, g, or t
  misc_feature (675)..(675): n is a, c, g, or t
  misc_feature (678)..(678): n is a, c, g, or t
  misc_feature (681)..(681): n is a, c, g, or t
  misc_feature (684)..(684): n is a, c, g, or t
  misc_feature (687)..(687): n is a, c, g, or t
  misc_feature (693)..(693): n is a, c, g, or t
  misc_feature (696)..(696): n is a, c, g, or t
  misc_feature (699)..(699): n is a, c, g, or t
  misc_feature (702)..(702): n is a, c, g, or t
  misc_feature (705)..(705): n is a, c, g, or t
  misc_feature (708)..(708): n is a, c, g, or t
  misc_feature (714)..(714): n is a, c, g, or t
  misc_feature (717)..(717): n is a, c, g, or t
  misc_feature (720)..(720): n is a, c, g, or t
  misc_feature (726)..(726): n is a, c, g, or t
  misc_feature (732)..(732): n is a, c, g, or t
  misc_feature (735)..(735): n is a, c, g, or t
  misc_feature (738)..(738): n is a, c, g, or t
  misc_feature (744)..(744): n is a, c, g, or t
  misc_feature (747)..(747): n is a, c, g, or t
  misc_feature (753)..(753): n is a, c, g, or t
  misc_feature (762)..(762): n is a, c, g, or t
  misc_feature (768)..(768): n is a, c, g, or t
  misc_feature (771)..(771): n is a, c, g, or t
  misc_feature (774)..(774): n is a, c, g, or t
  misc_feature (780)..(780): n is a, c, g, or t
  misc_feature (786)..(786): n is a, c, g, or t
  misc_feature (792)..(792): n is a, c, g, or t
  misc_feature (795)..(795): n is a, c, g, or t
  misc_feature (798)..(798): n is a, c, g, or t
  misc_feature (801)..(801): n is a, c, g, or t
  misc_feature (804)..(804): n is a, c, g, or t
  misc_feature (810)..(810): n is a, c, g, or t
  misc_feature (813)..(813): n is a, c, g, or t
  misc_feature (819)..(819): n is a, c, g, or t
  misc_feature (822)..(822): n is a, c, g, or t
  misc_feature (825)..(825): n is a, c, g, or t
  misc_feature (828)..(828): n is a, c, g, or t
  misc_feature (831)..(831): n is a, c, g, or t
  misc_feature (834)..(834): n is a, c, g, or t
  misc_feature (840)..(840): n is a, c, g, or t
  misc_feature (843)..(843): n is a, c, g, or t
  misc_feature (846)..(846): n is a, c, g, or t
  misc_feature (852)..(852): n is a, c, g, or t
  misc_feature (855)..(855): n is a, c, g, or t
  misc_feature (858)..(858): n is a, c, g, or t
  misc_feature (861)..(861): n is a, c, g, or t
  misc_feature (864)..(864): n is a, c, g, or t
  misc_feature (867)..(867): n is a, c, g, or t
  misc_feature (879)..(879): n is a, c, g, or t
  misc_feature (882)..(882): n is a, c, g, or t
  misc_feature (888)..(888): n is a, c, g, or t
  misc_feature (897)..(897): n is a, c, g, or t
  misc_feature (900)..(900): n is a, c, g, or t
  misc_feature (927)..(927): n is a, c, g, or t
  misc_feature (930)..(930): n is a, c, g, or t
  misc_feature (933)..(933): n is a, c, g, or t
  misc_feature (939)..(939): n is a, c, g, or t
  misc_feature (954)..(954): n is a, c, g, or t
  misc_feature (957)..(957): n is a, c, g, or t
  misc_feature (960)..(960): n is a, c, g, or t
  misc_feature (963)..(963): n is a, c, g, or t
  misc_feature (972)..(972): n is a, c, g, or t
  misc_feature (975)..(975): n is a, c, g, or t
  misc_feature (981)..(981): n is a, c, g, or t
  misc_feature (987)..(987): n is a, c, g, or t
  misc_feature (1020)..(1020): n is a, c, g, or t
  misc_feature (1026)..(1026): n is a, c, g, or t
  misc_feature (1029)..(1029): n is a, c, g, or t
  misc_feature (1032)..(1032): n is a, c, g, or t
  misc_feature (1038)..(1038): n is a, c, g, or t
  misc_feature (1041)..(1041): n is a, c, g, or t
  misc_feature (1050)..(1050): n is a, c, g, or t
  misc_feature (1053)..(1053): n is a, c, g, or t
  misc_feature (1068)..(1068): n is a, c, g, or t
  misc_feature (1071)..(1071): n is a, c, g, or t
  misc_feature (1080)..(1080): n is a, c, g, or t
  misc_feature (1095)..(1095): n is a, c, g, or t
  misc_feature (1098)..(1098): n is a, c, g, or t
  misc_feature (1104)..(1104): n is a, c, g, or t
  misc_feature (1107)..(1107): n is a, c, g, or t
  misc_feature (1110)..(1110): n is a, c, g, or t
  misc_feature (1113)..(1113): n is a, c, g, or t
  misc_feature (1116)..(1116): n is a, c, g, or t
  misc_feature (1119)..(1119): n is a, c, g, or t
  misc_feature (1122)..(1122): n is a, c, g, or t
  misc_feature (1125)..(1125): n is a, c, g, or t
  misc_feature (1131)..(1131): n is a, c, g, or t
  misc_feature (1137)..(1137): n is a, c, g, or t
  misc_feature (1140)..(1140): n is a, c, g, or t
  misc_feature (1143)..(1143): n is a, c, g, or t
  misc_feature (1146)..(1146): n is a, c, g, or t
  misc_feature (1164)..(1164): n is a, c, g, or t
  misc_feature (1167)..(1167): n is a, c, g, or t
  misc_feature (1170)..(1170): n is a, c, g, or t
  misc_feature (1173)..(1173): n is a, c, g, or t
  misc_feature (1176)..(1176): n is a, c, g, or t
  misc_feature (1179)..(1179): n is a, c, g, or t
  misc_feature (1182)..(1182): n is a, c, g, or t
  misc_feature (1188)..(1188): n is a, c, g, or t
  misc_feature (1197)..(1197): n is a, c, g, or t
  misc_feature (1206)..(1206): n is a, c, g, or t
  misc_feature (1209)..(1209): n is a, c, g, or t
  misc_feature (1212)..(1212): n is a, c, g, or t
  misc_feature (1218)..(1218): n is a, c, g, or t
  misc_feature (1224)..(1224): n is a, c, g, or t
  misc_feature (1239)..(1239): n is a, c, g, or t
  misc_feature (1242)..(1242): n is a, c, g, or t
  misc_feature (1245)..(1245): n is a, c, g, or t
  misc_feature (1251)..(1251): n is a, c, g, or t
  misc_feature (1254)..(1254): n is a, c, g, or t
  misc_feature (1263)..(1263): n is a, c, g, or t
  misc_feature (1275)..(1275): n is a, c, g, or t
  misc_feature (1278)..(1278): n is a, c, g, or t
  misc_feature (1284)..(1284): n is a, c, g, or t
  misc_feature (1287)..(1287): n is a, c, g, or t
  misc_feature (1293)..(1293): n is a, c, g, or t
  misc_feature (1311)..(1311): n is a, c, g, or t
  misc_feature (1314)..(1314): n is a, c, g, or t
  misc_feature (1320)..(1320): n is a, c, g, or t
  misc_feature (1323)..(1323): n is a, c, g, or t
  misc_feature (1326)..(1326): n is a, c, g, or t
  misc_feature (1329)..(1329): n is a, c, g, or t
  misc_feature (1332)..(1332): n is a, c, g, or t
  misc_feature (1335)..(1335): n is a, c, g, or t
  misc_feature (1338)..(1338): n is a, c, g, or t
  misc_feature (1341)..(1341): n is a, c, g, or t
  misc_feature (1344)..(1344): n is a, c, g, or t
  misc_feature (1347)..(1347): n is a, c, g, or t
  misc_feature (1353)..(1353): n is a, c, g, or t
  misc_feature (1356)..(1356): n is a, c, g, or t
  misc_feature (1359)..(1359): n is a, c, g, or t
  misc_feature (1362)..(1362): n is a, c, g, or t
  misc_feature (1365)..(1365): n is a, c, g, or t
  misc_feature (1368)..(1368): n is a, c, g, or t
  misc_feature (1374)..(1374): n is a, c, g, or t
  misc_feature (1377)..(1377): n is a, c, g, or t
  misc_feature (1383)..(1383): n is a, c, g, or t
  misc_feature (1386)..(1386): n is a, c, g, or t
  misc_feature (1389)..(1389): n is a, c, g, or t
  misc_feature (1392)..(1392): n is a, c, g, or t
  misc_feature (1395)..(1395): n is a, c, g, or t
  misc_feature (1401)..(1401): n is a, c, g, or t
  misc_feature (1404)..(1404): n is a, c, g, or t
  misc_feature (1407)..(1407): n is a, c, g, or t
  misc_feature (1416)..(1416): n is a, c, g, or t
  misc_feature (1419)..(1419): n is a, c, g, or t
  misc_feature (1425)..(1425): n is a, c, g, or t
  misc_feature (1428)..(1428): n is a, c, g, or t
  misc_feature (1434)..(1434): n is a, c, g, or t
  misc_feature (1440)..(1440): n is a, c, g, or t
  misc_feature (1443)..(1443): n is a, c, g, or t
  misc_feature (1446)..(1446): n is a, c, g, or t
  misc_feature (1449)..(1449): n is a, c, g, or t
  misc_feature (1455)..(1455): n is a, c, g, or t
  misc_feature (1458)..(1458): n is a, c, g, or t
  misc_feature (1461)..(1461): n is a, c, g, or t
  misc_feature (1467)..(1467): n is a, c, g, or t
  misc_feature (1470)..(1470): n is a, c, g, or t
  misc_feature (1479)..(1479): n is a, c, g, or t
  misc_feature (1482)..(1482): n is a, c, g, or t
  misc_feature (1485)..(1485): n is a, c, g, or t
  misc_feature (1488)..(1488): n is a, c, g, or t
  misc_feature (1491)..(1491): n is a, c, g, or t
  misc_feature (1494)..(1494): n is a, c, g, or t
  misc_feature (1500)..(1500): n is a, c, g, or t
  misc_feature (1503)..(1503): n is a, c, g, or t
  misc_feature (1506)..(1506): n is a, c, g, or t
  misc_feature (1509)..(1509): n is a, c, g, or t
  misc_feature (1512)..(1512): n is a, c, g, or t
  misc_feature (1515)..(1515): n is a, c, g, or t
  misc_feature (1518)..(1518): n is a, c, g, or t
  misc_feature (1521)..(1521): n is a, c, g, or t
  misc_feature (1524)..(1524): n is a, c, g, or t
  misc_feature (1527)..(1527): n is a, c, g, or t
  misc_feature (1530)..(1530): n is a, c, g, or t
  misc_feature (1533)..(1533): n is a, c, g, or t
  misc_feature (1536)..(1536): n is a, c, g, or t
  misc_feature (1539)..(1539): n is a, c, g, or t
  misc_feature (1542)..(1542): n is a, c, g, or t
  misc_feature (1545)..(1545): n is a, c, g, or t
  misc_feature (1551)..(1551): n is a, c, g, or t
  misc_feature (1554)..(1554): n is a, c, g, or t
  misc_feature (1557)..(1557): n is a, c, g, or t
  misc_feature (1560)..(1560): n is a, c, g, or t
  misc_feature (1563)..(1563): n is a, c, g, or t
  misc_feature (1569)..(1569): n is a, c, g, or t
  misc_feature (1587)..(1587): n is a, c, g, or t
  misc_feature (1590)..(1590): n is a, c, g, or t
  misc_feature (1593)..(1593): n is a, c, g, or t
  misc_feature (1596)..(1596): n is a, c, g, or t
  misc_feature (1599)..(1599): n is a, c, g, or t
  misc_feature (1602)..(1602): n is a, c, g, or t
  misc_feature (1605)..(1605): n is a, c, g, or t
  misc_feature (1608)..(1608): n is a, c, g, or t
  misc_feature (1611)..(1611): n is a, c, g, or t
  misc_feature (1626)..(1626): n is a, c, g, or t
  misc_feature (1632)..(1632): n is a, c, g, or t
  misc_feature (1635)..(1635): n is a, c, g, or t
  misc_feature (1638)..(1638): n is a, c, g, or t
  misc_feature (1641)..(1641): n is a, c, g, or t
  misc_feature (1650)..(1650): n is a, c, g, or t
  misc_feature (1653)..(1653): n is a, c, g, or t
  misc_feature (1659)..(1659): n is a, c, g, or t
  misc_feature (1662)..(1662): n is a, c, g, or t
atgccnwsntgggcnytnttyatggtnacnwsntgyytnytnytngcnccncaraayytngcncargtnwsnwsncargaygtnwsnytnytngcnwsngaywsngarccnytnaartgyttywsnmgnacnttygargayytnacntgyttytgggaygargargargcngcnccnwsnggnacntaycarytnytntaygcntayccnmgngaraarccnmgngcntgyccnytnwsnwsncarwsnatgccncayttyggnacnmgntaygtntgycarttyccngaycargargargtnmgnytnttyttyccnytncayytntgggtnaaraaygtnttyytnaaycaracnmgnacncarmgngtnytnttygtngaywsngtnggnytnccngcnccnccnwsnathathaargcnatgggnggnwsncarccnggngarytncarathwsntgggargarccngcnccngarathwsngayttyytnmgntaygarytnmgntayggnccnmgngayccnaaraaywsnacnggnccnacngtnathcarytnathgcnacngaracntgytgyccngcnytncarmgnccncaywsngcnwsngcnytngaycarwsnccntgygcncarccnacnatgccntggcargayggnccnaarcaracnwsnccnwsnmgngargcnwsngcnytnacngcngarggnggnwsntgyytnathwsnggnytncarccnggnaaywsntaytggytncarytnmgnwsngarccngayggnathwsnytnggnggnwsntggggnwsntggwsnytnccngtnacngtngayytnccnggngaygcngtngcnytnggnytncartgyttyacnytngayytnaaraaygtnacntgycartggcarcarcargaycaygcnwsnwsncarggnttyttytaycaywsnmgngcnmgntgytgyccnmgngaymgntayccnathtgggaraaytgygargargargaraaracnaayccnggnytncaracnccncarttywsnmgntgycayttyaarwsnmgnaaygaywsnathathcayathytngtngargtnacnacngcnccnggnacngtncaywsntayytnggnwsnccnttytggathcaycargcngtnmgnytnccnacnccnaayytncaytggmgngarathwsnwsnggncayytngarytngartggcarcayccnwsnwsntgggcngcncargaracntgytaycarytnmgntayacnggngarggncaycargaytggaargtnytngarccnccnytnggngcnmgnggnggnacnytngarytnmgnccnmgnwsnmgntaymgnytncarytnmgngcnmgnytnaayggnccnacntaycarggnccntggwsnwsntggwsngayccnacnmgngtngaracngcnacngaracngcntggathwsnytngtnacngcnytncayytngtnytnggnytnwsngcngtnytnggnytnytnytnytnmgnwsnaarmgnwsnmgnytnytncaywsngaytayatgaayatgacnccnmgnmgnccnggnccnacnmgnaarcaytaycarccntaygcnccnccnmgngayttygcngcntaymgnwsntrrtrr

What is claimed is:

1. A T or NK cell comprising a chimeric recombinant growth factor receptor (CrGFR) comprising:
(i) an extracellular (EC) domain;
(ii) a thrombopoietin transmembrane (TM) domain; and
(iii) a first intracellular (IC) domain; and, optionally,
(iv) a second intracellular domain.

2. The T or NK cell according to claim 1 wherein binding of a ligand to the CrGFR induces proliferation of the T or NK cell.

3. The T or NK cell according to claim 2 wherein the ligand is human thrombopoietin, a thrombopoietin receptor agonist, or a tumour associated antigen.

4. The T or NK cell according to claim 3 wherein the thrombopoietin receptor agonist binds to the TM domain.

5. The T or NK cell according to claim 3 wherein the thrombopoietin receptor agonist is Eltrombopag or Romiplostim.

6. The T or NK cell according claim 1 wherein the EC domain comprises the human c-mpl (thrombopoietin) EC domain.

7. The T or NK cell according to claim 1 wherein the EC domain comprises one or more of i) a truncated EC domain, ii) a truncated c-mpl EC domain, iii) a domain that binds to a tumour associated antigen, iv) an antibody or antibody fragment that binds to a tumour associated antigen; and v) a selection marker.

8. The T or NK cell according to claim 1 wherein the first IC domain is selected from human growth hormone receptor, human prolactin receptor, human thrombopoietin receptor (c-mpl), G-CSF receptor, GM-CSF receptor, LMP, IL2, CD28 or CD137.

9. The T or NK cell according to claim 1 wherein the first IC domain comprises the IC domain from human thrombopoietin receptor (c-mpl), or a truncated IC domain from human thrombopoietin receptor (c-mpl).

10. The T or NK cell according to claim 1 wherein the second IC domain is from human growth hormone receptor, human prolactin receptor, human thrombopoietin receptor (c-mpl), G-CSF receptor or GM-CSF receptor, a costimulatory receptor, a cytokine receptor or a cosignalling receptor.

11. The T or NK cell according to claim 8 or claim 9 wherein the second IC domain is selected from human thrombopoietin receptor (c-mpl), or a truncated IC domain from human thrombopoietin receptor (c-mpl) preferably TpoR Δ60, CD40, IL2rβ, IL2Rγ, ITAM1 or LMP1.

12. The T or NK cell according to claim 1 wherein the CrGFR comprises the TM sequence shown in SEQ ID NO: 1, or a variant thereof having at least 80% sequence identity, which binds human thrombopoietin or a thrombopoietin receptor agonist.

13. The T or NK cell comprising a chimeric recombinant growth factor receptor (CrGFR), wherein the CrGFR comprises the sequence shown as SEQ ID NOS: 3, 4, 5, 6, 7, 8, 9, 10, 11, 12, 13, or 14, or a variant thereof having at least 80%, 85%, 90% 95% 97% or 99% sequence identity which binds human thrombopoietin or a thrombopoietin receptor agonist.

14. A T or NK cell according to claim 13 wherein binding by thrombopoietin, or a human thrombopoietin receptor agonist induces cell proliferation and/or survival.

15. The T cell or NK cell according to claim 1 which binds to Eltrombopag.

16. The T cell or NK cell according to claim 1 wherein the T cell is selected from a Tumour Infiltrating Lymphocyte (TIL) a T Regulatory Cell (Treg) or a primary T cell.

17. The T cell or NK cell according to claim 1 further comprising a recombinant T-cell receptor (TCR) and/or Chimeric Antigen Receptor (CAR).

18. A chimeric recombinant growth factor receptor (CrGFR) as defined in claim 1.

19. A cell comprising the chimeric recombinant growth factor receptor (CrGFR) according to claim 18.

20. A nucleic acid sequence encoding the CrGFR as defined in claim 1.

21. A nucleic acid sequence according to claim 20 which comprises the sequence shown as SEQ ID NOS: 15, 16, 17, 18, 19, 20, 21, 22, 23, 24, 25, 26, 27 or 28.

22. A vector which comprises a nucleic acid sequence according to claim 20.

23. A method for making a T cell or NK cell according to claim 1, which comprises the step of introducing a nucleic acid according to claim 20 into a T cell or NK cell.

24. A pharmaceutical composition which comprises a vector according to claim 22 or a T or NK cell according to claim 1, together with a pharmaceutically acceptable carrier, diluent or excipient.

25. A method of in-vivo cell expansion comprising administering the cells of claim 1, or pharmaceutical composition of claim 24 to a subject.

26. A method of in-vivo cell expansion according to claim 25 comprising administering thrombopoietin, or a thrombopoietin receptor agonist such as Eltrombopag or Romiplostim, to a subject.

27. A T or NK cell according to claim 1, or vector according to claim 22, for use in adoptive cell therapy.

28. A T or NK cell according to claim 1, or vector according to claim 22, for use in a method of treating cancer.

29. A method for treating cancer which comprises the step of administering the T cell or NK cell according to claim 1 to a subject.
